(19) United States
(12) Patent Application Publication
(10) Pub. No.: US 2023/0330128 A1
(43) Pub. Date: Oct. 19, 2023

(54) OLIGOMERS HAVING BICYCLIC SCAFFOLD MOIETIES

(71) Applicant: BioMarin Technologies B.V., Leiden (NL)

(72) Inventors: Judith Christina Theodora van Deutekom, Dordrecht (NL); Peter Christian de Visser, Leiden (NL)

(21) Appl. No.: 18/179,064

(22) Filed: Mar. 6, 2023

Related U.S. Application Data
(62) Division of application No. 15/642,270, filed on Jul. 5, 2017.

(30) Foreign Application Priority Data
Jul. 5, 2016 (EP) 16177973.1

(51) Int. Cl. A61K 31/712; C12N 15/113

(52) U.S. Cl. CPC A61K 31/712; C12N 15/113; A61K 31/34; C12N 2310/11; C12N 2310/315; C12N 2310/321; C12N 2310/3231; C12N 2310/3341; C12N 2310/346; C12N 2320/33

(57) ABSTRACT

The current invention provides antisense splice-switching oligonucleotides with improved characteristics that enhance clinical applicability for treating, ameliorating, preventing, and/or delaying neuromuscular disorders, such as DMD.

### RELATED APPLICATIONS

[0001] This application is a divisional of U.S. Application Serial No. 15/642,270, filed Jul. 5, 2017, which claims priority to European Patent Application No. EP16177973.1, filed Jul. 5, 2016. The contents of each of the above applications is incorporated by reference herein in its entirety.

### SEQUENCE LISTING

[0002] This application contains a Sequence Listing, which is being submitted herewith as an XML filed named “035101USDV1_SL.xml”, created on Mar. 6, 2023, size 17,632,624 bytes, which is incorporated by reference herein in its entirety.

### FIELD

[0003] The invention relates to the field of antisense oligonucleotides, more specifically splice-switching oligonucleotides for the treatment of genetic disorders, more specifically neuromuscular disorders. The invention in particular relates to the use of oligonucleotides with improved characteristics enhancing clinical applicability as further defined herein.

### BACKGROUND OF THE INVENTION

[0004] Antisense oligonucleotides (AONs) are in (pre)clinical development for many diseases and conditions, including cancer, inflammatory conditions, cardiovascular disease and neurodegenerative and neuromuscular disorders. Their mechanism of action is aimed at various targets, such as RNaseH-mediated degradation of target RNA in the nucleus or cytoplasm, at splice-modulation (exon inclusion or skipping) in the nucleus, or at translation inhibition by steric hindrance of ribosomal subunit binding in the cytoplasm. Splice-modulating or splice-switching oligonucleotides (SSOs) were first described for correction of aberrant splicing in human β-globin pre-mRNAs (Dominski and Kole, 1993), and are currently being studied for a variety of genetic disorders including, but not limited to, cystic fibrosis (CFTR gene, Friedman et al., 1999), breast cancer (BRCA1 gene, Uchikawa et al., 2007), prostate cancer (FOLH1 gene, Williams et al., 2006), inflammatory diseases (IL-5Ralpha and MyD88 genes, Karras et al., 2001, Vickers et al., 2006), ocular albinism type 1 (OA1 gene, Vetrini et al., 2006), ataxia telangiectasia (ATM gene, Du et al., 2007), nevoid basal cell carcinoma syndrome (PTCH1 gene, Uchikawa et al., 2007), methylmalonic acidemia (MUT gene, Rincon et al., 2007), preterm labor (COX-2 gene, Tyson-Capper et al., 2006), artherosclerosis (APOB gene, Khoo et al., 2007), propionic acidemia (PCCA, PCCB genes, Rincon et al., 2007), leukemia (c-myc and WT1 genes, Renshaw et al., 2004, Giles et al., 1999), dystrophic epidermolysis bullosa (COL7A1 gene, Goto et al., 2006), familial hypercholesterolemia (APOB gene, Disterer et al., 2013), laser-induced choroidal neovascularization and corneal graft rejection (KDR gene, Uehara et al., 2013), hypertrophic cardiomyopathy (MYBPC3 gene, Gedicke-Hornung et al., 2013), Usher syndrome (USH1C gene, Lentz et al., 2013), fukuyama congenital muscular dystrophy (FKTN gene, Taniguchi-Ikeda et al., 2011), laser-induced choroidal neovascularization (FLT1 gene, Owen et al., 2012), cancer (STAT3 and bcl-X genes, Zammarchi et al., 2011, Mercatante et al., 2002), and Hutchinson-Gilford progeria (LMNA gene, Osorio et al., 2011), Miyoshi myopathy (DYSF gene, Wein et al., 2010), spinocerebellar ataxia type 1 (ATXN1 gene, Gao et al., 2008), Alzheimer’s disease/FTDP-17 taupathies (MAPT gene, Peacey et al., 2012), myotonic dystrophy (CLC1 gene, Wheeler et al., 2007), and Huntington’s disease (Evers et al., 2014). However, splice-switching AONs have progressed furthest in the treatment of the neuromuscular disorders Duchenne muscular dystrophy (DMD) an spinal muscular dystrophy (spinal muscular atrophy (SMA) type).

[0005] Duchenne muscular dystrophy (DMD) and Becker muscular dystrophy (BMD) are the most common childhood forms of muscular dystrophy. DMD is a severe, lethal neuromuscular disorder resulting in a dependency on wheelchair support before the age of 12 and patients often die before the age of thirty due to respiratory- or heart failure. It is caused by reading frame-shifting deletions (~67%) or duplications (~7%) of one or more exons, or by point mutations (~25%) in the 2.24 Mb DMD gene, resulting in the absence of functional dystrophin. BMD is also caused by mutations in the DMD gene, but these maintain the open reading frame, yield semi-functional dystrophin proteins, and result in a typically much milder phenotype and longer lifespan. During the last decade, specific modification of splicing in order to restore the disrupted reading frame of the transcript has emerged as a promising therapy for DMD (van Ommen et al., 2008; Yokota et al., 2007; van Deutekom et al., 2007; Goemans et al., 2011; Voit et al., 2014; Cirak et al., 2011). Using highly sequence-specific splice-switching antisense oligonucleotides (AONs) which bind to the exon flanking or containing the mutation and which interfere with its splicing signals, the skipping of that exon can be induced during the processing of the DMD pre-mRNA. Despite the resulting truncated transcript, the open reading frame is restored and a protein is produced which is similar to those found in BMD patients. AON-induced exon skipping provides a mutation-specific, and thus personalized, therapeutic approach for DMD patients. As the majority of the mutations cluster around exons 45 to 55, the skipping of one specific exon may be therapeutic for many patients with different mutations. The skipping of exon 51 applies to the largest subset of patients (~13%), including those with deletions of exons 45 to 50, 48 to 50, 50, or 52. The AONs applied are chemically modified to resist endonucleases, exonucleases, and RNaseH, and to promote RNA binding and duplex stability. Different AON chemistries are currently being explored for inducing corrective exon skipping for DMD, including 2′-O-methyl phosphorothioate RNA (2OMePS; Voit et al., 2014), phosphorodiamidate morpholino (PMO; Cirak et al., 2011), tricyclo DNA (tcDNA; Goyenvalle et al, 2015), and peptide nucleic acid (PNA; Gao et al., 2015). Although AONs are typically not well taken up by healthy muscle fibers, the dystrophin deficiency in DMD and the resulting pathology, characterized by activated satellite cells and damaged and thus more permeable fiber membranes, actually facilitates a better uptake. In studies in the dystrophin-deficient mdx mouse model, 2′-O-methyl phosphorothioate RNA oligonucleotides have indeed demonstrated an up to 10 times higher uptake in different muscle groups when compared to that in wild type mice (Heemskerk et al., 2010). Although the recent phase I/II results with both 2′-O-methyl phosphorothioate RNA and phosphorodiamidate morpholino AONs in DMD patients confirm presence of the AONs in muscle biopsies, the different chemical modifications seem to result in a differential uptake by and distribution throughout muscle. Furthermore, in both studies the levels of novel dystrophin after treatment were still limited, which challenges the field to develop oligonucleotides with improved characteristics enhancing therapeutic index and clinical applicability.

[0006] Spinal Muscular Atrophy (SMA) is an autosomal recessive disease affecting 1 in 6000 newborn children, and is caused by mutations in the survival of motor neuron gene 1 (SMN1). It results in progressive loss of motor neurons in the spinal cord and subsequent atrophy of voluntary muscles. Clinical severity depends on naturally occurring exon 7 inclusion levels in the almost identical SMN2 gene and the number of copies of SMN2. In SMN2, a C>T transition in an exon 7 splicing enhancer site normally results in an unstable exon 7-skipped isoform and insufficient levels of full-length isoform (Khoo and Krainer, 2009). However, effective SMN2 exon 7 inclusion can be achieved by blocking an intronic splicing silencer in the 5′ region of intron 7 (ISS-N1; Singh et al., 2006; Hua et al., 2008) with splice-switching AONs. On the basis of successful mouse studies (Hua et al., 2010, 2011; Passini et al., 2011) a candidate AON (ISIS-SMN_{Rx}, ISIS396443, ornusinersen) is currently in clinical development by IONIS Pharmaceuticals (Carlsbad, CA). In phase 1 studies, direct injection of a single 9-mg dose of ISIS-SMN_{Rx}into the intrathecal space resulted in broad distribution in the central nervous system and some motor function improvement in children with SMA (Swoboda et al., 2014, Chiriboga et al., 2016). However, systemic SSO delivery may be needed to alleviate cardiac pathology and to increase peripheral motor neuron function and consequently survival.

[0007] Clinical efficacy of systemically administered AONs, such as splice-switching AONs, depends on multiple factors such as administration route, biostability, biodistribution, intra-tissue distribution, uptake by target cells, and routing to the desired intracellular location (nucleus). These factors are at least in part determined by the chemical structure of the AONs.. Part of the invention shows that certain chemical modifications in the AON scaffold can lead to AONs that show improved characteristics for possible treatment of genetic disorders.

[0008] In conclusion, to enhance the therapeutic applicability of AONs such as splice-switching AONs for genetic disorders such as DMD, BMD, or SMA, there is a need for AONs with optimized chemical characteristics.

### BRIEF DESCRIPTION OF THE FIGURES

[0009] FIGS. 1A-B. The effect of implementation of a 5′ and/or 3′ BNA scaffold-modified nucleotide on AON-induced DMD exon 51 skipping (FIG. 1A) and dystrophin production (FIG. 1B) in a DMD patient (del. exon 48-50) muscle cell culture, compared to an iso-sequential AON without BNA modification based on SEQ ID NO:452. The BNA modification in this case is LNA (SEQ ID NOs shown in the figure relate to SEQ ID NOs where the BNA scaffold modifications as indicated result in an LNA monomer). (FIG. 1A): Average exon 51 skipping percentages were determined by RT-ddPCR analysis of triplicate RNA samples, error bars indicate standard deviation, AON (800 nM or 4 µM). (FIG. 1B): Average chemiluminescence values (area under curve (AUC) from electropherogram) were measured by Simple Western Capillary Immunoassay; high to low protein concentrations were loaded HC= healthy control muscle sample, NT= non-treated sample, AON concentration 800 nM.

[0010] FIGS. 2A-B. The effect of implementation of a 5′ and/or 3′ BNA scaffold-modified nucleotide on AON-induced DMD exon 51 skipping in a DMD patient (del. exon 48-50) muscle cell culture, compared to an iso-sequential AON without BNA modification based on SEQ ID NO:452. The BNA modification in FIG. 2A is CRN (SEQ ID NOs: 453C and 455C shown in the figure relate to SEQ ID NO: 453 and 455 where the BNA scaffold modifications as indicated result in a CRN monomer). The BNA modification in FIG. 2B is 2′-amino-2′-deoxy LNA, which in this application is referred to as 2′-amino-LNA (SEQ ID NO: 456A shown in the figure relate to SEQ ID NO: 456 where the BNA scaffold modification as indicated result in a 2′-amino-LNA monomer). Average exon 51 skipping percentages were determined by RT-ddPCR analysis of triplicate RNA samples, error bars indicate standard deviation, AON concentration 800 nM (FIG. 2B) or 4 µM (FIG. 2A and FIG. 2B).

[0011] FIG. 3. The effect of implementation of a 5′ and/or 3′ BNA scaffold-modified nucleotide on AON-induced DMD exon 51 skipping in the hDMD mouse model after 12 wks of IV treatment (100 mg/kg AON weekly). The BNA modification in this case is LNA (SEQ ID NOs shown in the figure relate to SEQ ID NOs where the BNA scaffold modifications as indicated result in an LNA monomer). Average exon 51 skipping percentages were determined by RT-ddPCR analysis of muscle RNA samples.

[0012] FIG. 4. The effect of implementation of at least one BNA scaffold-modified nucleotide on AON-induced DMD exon 51 skipping in a DMD patient (del. exon 48-50) muscle cell culture, compared to an iso-sequential AON without BNA modification based on SEQ ID NO: 452 (all at 800 nM). The BNA modification in this case results in LNA (SEQ ID NOs shown in the figure relate to SEQ ID NOs where the BNA scaffold modifications as indicated result in an LNA monomer). Average fold increase of exon 51 skipping levels over SEQ ID NO: 452 are based on RT-ddPCR analysis of triplicate RNA samples.

[0013] FIGS. 5A-C. The effect of implementation of a 5′ and 3′ BNA scaffold-modified nucleotide on AON-induced DMD exon 44 skipping (FIG. 5A, SEQ ID NO: 29), exon 45 skipping (FIG. 5B, SEQ ID NO: 3185), and exon 53 skipping (FIG. 5C, SEQ ID NO: 863) in healthy human muscle cells, compared to iso-sequential AONs without BNA scaffold modifications (SEQ ID NO: 26 (exon 44), SEQ ID NO: 6049 (exon 45), and SEQ ID NO: 860 (exon 53). The BNA modification in this case results in LNA (SEQ ID NOs shown in the figure relate to SEQ ID NOs where the BNA scaffold modifications as indicated result in an LNA monomer). The average exon skipping percentages were determined by RT-ddPCR analysis of RNA samples (n=6), error bars indicate standard deviation, AON (800 nM or 4 µM).

### SUMMARY

### Oligonucleotide

[0014] In a first aspect, the invention provides an oligonucleotide comprising a 2′-substituted monomer, preferably a 2′-substituted RNA monomer, and a phosphorothioate backbone or consisting of 2′-substituted monomers, preferably of 2′-substituted RNA monomers, linked by phosphorothioate backbone linkages, and comprising a bicyclic nucleic acid (BNA) scaffold modification, and comprising a 5-methylpyrimidine base, preferably for use as a medicament for treating a disease or condition through splice modulation, such as through exon skipping, or exon inclusion, both of which are forms of splice switching. Preferred diseases in this context are Duchenne Muscular Dystrophy, Becker Muscular Dystrophy, and Spinal Muscular Atrophy.

[0015] For oligonucleotides as described in this application, when a feature of a monomer is not defined and is not apparent from context, the corresponding feature from an RNA monomer is to be assumed.

[0016] As such, in this aspect the invention provides an oligonucleotide comprising:
[0017] i) Ia) at least one 2′-substituted monomer and optionally a phosphorothioate backbone linkage, or
[0018] Ib) only 2′-substituted monomers linked by phosphorothioate backbone linkages and/or by phosphodiester linkages,
[0019] ii) a 5-methylcytosine and/or a 5-methyluracil base and
[0020] iii) at least one monomer comprising a bicyclic nucleic acid (BNA) scaffold modification.

[0021] Preferably, said monomers are RNA monomers, or are derived from RNA monomers. Such oligonucleotides will be referred to herein as oligonucleotides according to the invention. As such, a preferred oligonucleotide according to the invention comprises:
[0022] i) Ia) at least one 2′-substituted monomer, preferably an RNA monomer or a 2′-O-substituted RNA monomer, and optionally a phosphorothioate backbone linkage, or
[0023] Ib) only 2′-substituted monomers, preferably RNA monomers or 2′-O-substituted RNA monomers, linked by phosphorothioate backbone linkages and/or by phosphodiester linkages,
[0024] ii) a 5-methylcytosine and/or a 5-methyluracil base and
[0025] iii) at least one monomer comprising a bicyclic nucleic acid (BNA) scaffold modification.

[0026] Preferred oligonucleotides according to the invention have a length of less than 34 oligonucleotides. Said oligonucleotide may have 10, 11, 12, 13, 14, 15, 16, 17, 18, 19, 20, 21, 22, 23, 24, 25, 26, 27, 28, 29, 30, 31, 32, or 33 nucleotides. Such oligonucleotide may also be identified as an oligonucleotide having from 10 to 33 nucleotides. More preferred oligonucleotides according to the invention have a length of 16, 17, 18, 19, 20, 21, or 22 nucleotides, and may be identified as an oligonucleotide having from 16 to 22 nucleotides.

[0027] In another embodiment, the oligonucleotide according to the invention is from 16 to 25 nucleotides in length. In another embodiment, the oligonucleotide according to the invention is from 16 to 24 nucleotides in length. In another embodiment, the oligonucleotide is from 16 to 22 nucleotides in length. In another embodiment, the oligonucleotide according to the invention is 16, 18, 20, or 22 nucleotides in length. In another embodiment, the oligonucleotide according to the invention is 21, 22, 24, or 25 nucleotides in length. In another embodiment, the oligonucleotide according to the invention is 18, 22, 24, or 25 nucleotides in length.

[0028] In another embodiment, the oligonucleotide is from 16 to 25 nucleotides in length and is for skipping exons 44, 45, 51, or 53 of pre-mRNA of dystrophin. In another embodiment, the oligonucleotide is from 16 to 24 nucleotides in length and is for skipping exons 44, 51, or 53 of pre-mRNA of dystrophin. In another embodiment, the oligonucleotide is from 16 to 22 nucleotides in length and is for skipping exon 51 of pre-mRNA of dystrophin. In another embodiment, the oligonucleotide is 16, 18, 20, or 22 nucleotides in length and is for skipping exon 51 of pre-mRNA of dystrophin. In another embodiment, the oligonucleotide is 20 or 23 nucleotides in length and is for skipping exon 44 of pre-mRNA of dystrophin. In another embodiment, the oligonucleotide is 21, 22, 24, or 25 nucleotides in length and is for skipping exon 45 of pre-mRNA of dystrophin. In another embodiment, the oligonucleotide is 18, 22, 24, or 25 nucleotides in length and is for skipping exon 53 of pre-mRNA of dystrophin. Throughout this application, reference to dystrophin is preferably interpreted as reference to human dystrophin.

[0029] Encompassed by the above ((i)(Ia)) are oligonucleotides that comprise at least one 2′-substituted monomer, preferably a 2′-substituted RNA monomer, and no phosphorothioate backbone linkage. Such an oligonucleotide can have a backbone that only comprises phosphodiester linkages. Similarly encompassed are oligonucleotides that comprise at least one 2′-substituted monomer, preferably a 2′-substituted RNA monomer, and one or more phosphorothioate backbone linkages.

[0030] Encompassed by the above ((i)(Ib)) are oligonucleotides that comprise no other monomers than 2′-substituted RNA monomers, and that comprise only backbone linkages that are phosphorothioate backbone linkages. Similarly encompassed are oligonucleotides that comprise no other monomers than 2′-substituted RNA monomers, and that comprise only backbone linkages that are phosphodiester backbone linkages.

[0031] As known to the skilled person, an oligonucleotide such as an RNA oligonucleotide generally consists of repeating monomers. Such a monomer is most often a nucleotide or a nucleotide analogue. The most common naturally occurring nucleotides in RNA are adenosine monophosphate, cytidine monophosphate, guanosine monophosphate, thymidine monophosphate, and uridine monophosphate. These consist of a pentose sugar ribose, a 5′-linked phosphate group which is linked via a phosphate ester, and a 1′-linked base. The sugar connects the base and the phosphate, and is therefore often referred to as the scaffold of the nucleotide. A modification in the pentose sugar is therefore often referred to as a scaffold modification. For severe modifications, the original pentose sugar might be replaced in its entirety by another moiety that similarly connects the base and the phosphate. It is therefore understood that while a pentose sugar is often a scaffold, a scaffold is not necessarily a pentose sugar.

[0032] A base, sometimes called a nucleobase, is generally adenine, cytosine, guanine, thymine, or uracil, or a derivative thereof. Cytosine, thymine, and uracil are pyrimidine bases, and are generally linked to the scaffold through their 1-nitrogen. Adenine and guanine are purine bases, and are generally linked to the scaffold through their 9-nitrogen.

[0033] A nucleotide is generally connected to neighbouring nucleotides through condensation of its 5′-phosphate moiety to the 3′-hydroxyl moiety of the neighbouring nucleotide monomer. Similarly, its 3′-hydroxyl moiety is generally connected to the 5′-phosphate of a neighbouring nucleotide monomer. This forms phosphodiester bonds. The phosphodiesters and the scaffold form an alternating copolymer. The bases are grafted to this copolymer, namely to the scaffold moieties. Because of this characteristic, the alternating copolymer formed by linked monomers of an oligonucleotide is often called the backbone of the oligonucleotide. Because the phosphodiester bonds connect neighbouring monomers together, they are often referred to as backbone linkages. It is understood that when a phosphate group is modified so that it is instead an analogous moiety such as a phosphorothioate, such a moiety is still referred to as the backbone linkage of the monomer. This is referred to as a backbone linkage modification. In general terms, the backbone of an oligonucleotide is thus comprised of alternating scaffolds and backbone linkages.

[0034] In another embodiment, the nucleobase is adenine, cytosine, guanine, thymine, or uracil. In another embodiment, the nucleobase is adenine, cytosine, guanine, or uracil. In another embodiment, the nucleobase is a modified form of adenine, cytosine, guanine, thymine, or uracil. In another embodiment, the modified nucleobase is hypoxanthine, pseudouracil, pseudocytosine, 1-methylpseudouracil, orotic acid, agmatidine, lysidine, 2-thiouracil, 2-thiothymine, 5-halouracil, 5-halomethyluracil, 5-trifluoromethyluracil, 5-propynyluracil, 5-propynylcytosine, 5-aminomethyluracil, 5-hydroxymethyluracil, 5-aminomethylcytosine, 5-hydroxymethylcytosine, 7-deazaguanine, 7-deazaadenine, 7-aza-2,6-diaminopurine, 8-aza-7-deazaguanine, 8-aza-7-deazaadenine, 8-aza-7-deaza-2,6-diaminopurine, pseudoisocytidine, N4-ethylcytosine, N2-cyclopentylguanine (cPent-G), N2-cyclopentyl-2-aminopurine (cPent-AP), or N2-propyl-2-aminopurine (Pr-AP). In another embodiment, the modified nucleobase is hypoxanthine, pseudouracil, pseudocytosine, 1-methylpseudouracil, orotic acid, agmatidine, lysidine, 2-thiouracil, 2-thiothymine, 5-halouracil, 5-halomethyluracil, 5-trifluoromethyluracil, 5-propynyluracil, 5-propynylcytosine, 5-aminomethyluracil, 5-hydroxymethyluracil, 5-aminomethylcytosine, or 5-hydroxymethylcytosine.

[0035] An oligonucleotide of the invention comprises or consists of 2′-substituted phosphorothioate monomer, preferably a 2′-substituted phosphorothioate RNA monomer, 2′-substituted phosphate RNA monomer, or 2′-substituted mixed phosphate/phosphorothioate RNA monomers. Such oligonucleotide comprises a 2′-substituted RNA monomer connected through or linked by a phosphorothioate or phosphate backbone linkage, or a mixture thereof, or consists of 2′-substituted phosphorothioate RNA, 2′-substituted phosphate RNA or a mixture thereof. Preferably, such oligonucleotide consists of 2′-substituted phosphorothioate RNA monomers, 2′-substituted phosphate RNA monomers, or a mixture thereof. The 2′-substituted RNA preferably is 2′-F, 2′-O-methyl, or 2′-O-(2-methoxyethyl). The 2′-O-(2-methoxyethyl) moiety is often referred to as 2′-MOE. More preferably, the 2′-substituted RNA monomer is a 2′-O-methyl RNA monomer. Such chemistries are known to the skilled person. In a preferred embodiment of this aspect is provided an oligonucleotide according to the invention, wherein said 2′-substituted monomer is a 2′-substituted RNA monomer, a 2′-F monomer, a 2′-amino monomer, a 2′-O-substituted monomer, a 2′-O-methyl monomer, or a 2′-O-(2-methoxyethyl) monomer, preferably a 2′-O-methyl monomer. Preferably, said 2′-substituted monomer is a 2′-substituted RNA monomer, such as a 2′-O-methyl RNA monomer.

[0036] Throughout the application, an oligonucleotide comprising a 2′-O-methyl monomer, or a 2′-O-methyl RNA monomer and a phosphorothioate, phosphate or mixed phosphate/phosphorothioate backbone linkages may be replaced respectively by an oligonucleotide comprising a 2′-O-methyl phosphorothioate RNA, 2′-O-methyl phosphate RNA or 2′-O-methyl phosphate/phosphorothioate RNA. Throughout the application, an oligonucleotide consisting of 2′-O-methyl RNA monomers linked by or connected through phosphorothioate, phosphate or mixed phosphate/phosphorothioate backbone linkages may be replaced by an oligonucleotide consisting of 2′-O-methyl phosphorothioate RNA, 2′-O-methyl phosphate RNA or 2′-O-methyl phosphate/phosphorothioate RNA.

[0037] In addition, an oligonucleotide of the invention comprises a base modification that increases binding affinity to target strands, increases melting temperature of the resulting duplex of said oligonucleotide with its target, and/or decreases immunostimulatory effects, and/or increases biostability, and/or improves biodistribution and/or intra-tissue distribution, and/or cellular uptake and trafficking. In a more preferred embodiment, an oligonucleotide of the invention comprises a 5-methylpyrimidine. A 5-methylpyrimidine is selected from a 5-methylcytosine and/or a 5-methyluracil and/or a thymine, in which thymine is identical to 5-methyluracil. ‘Thymine’ and ‘5-methyluracil’ may be interchanged throughout the document. Preferably, oligonucleotides of the invention comprise at least one of either a 5-methylcytosine base or a 5-methyluracil base. In a preferred embodiment of the invention therefore is provided the oligonucleotide as described above, wherein all cytosine bases are 5-methylcytosine bases, and/or wherein all uracil bases are 5-methyluracil bases. This relates to oligonucleotides that comprise 5-methylcytosine but no unsubstituted cytosine or uracil, to oligonucleotides that comprise 5-methyluracil but no unsubstituted cytosine or uracil, and to oligonucleotides that comprise both 5-methylcytosine and 5-methyluracil but no unsubstituted cytosine or uracil. It also relates to oligonucleotides that comprise 5-methylcytosine but no unsubstituted cytosine yet that comprise unsubstituted uracil, or to oligonucleotides that comprise 5-methyluracil but no unsubstituted uracil, yet that comprise unsubstituted cytosine.

[0038] An oligonucleotide of the invention comprises a scaffold modification that increases binding affinity to target strands, increases melting temperature of the resulting duplex of said oligonucleotide with its target, and/or decreases immunostimulatory effects, and/or increases biostability, and/or improves biodistribution and/or intra-tissue distribution, and/or cellular uptake and trafficking. Encompassed by the invention are those scaffold modifications that result in a bicyclic nucleic acid (BNA) monomer. A bicyclic scaffold is generally a pentose-derived scaffold that has been chemically altered to conformationally restrict the scaffold, leading to the improved effects above. Examples of bicyclic scaffolds are scaffolds where a first cycle such as a pentose cycle forms a spirane with a further cyclic moiety so that both cycles share only one atom, scaffolds where a first cycle such as a pentose cycle is fused to a further cyclic moiety so that both cycles share two adjacent atoms, and scaffolds where a first cycle such as a pentose cycle forms a bridged compound through a moiety that is linked to the first cyclic moiety at two non-adjacent atoms. Such non-adjacent atoms are referred to as bridgehead atoms. Bridged compounds comprise multiple cycles, each of which overlap over at least three atoms. A compound with two cycles wherein those cycles overlap over only two atoms is a fused compound instead. In some bridged compounds, the smallest link between two bridgehead atoms is referred to as the bridging moiety, or as the bridge moiety. In other bridged compounds, when one cycle is a characteristic cycle such as the pentose cycle of a nucleotide, the moiety that is not constitutive to that characteristic cycle is referred to as the bridging moiety. It follows that the nomenclature of bridged bicyclic compounds is context-dependent.

[chemical structure]

[chemical structure]

[chemical structure]

[0039] Bicyclic compounds can comprise additional cycles. A bicyclic compound according to the invention is at least bicyclic, and said two cycles constitute a spirane, a fused system, or a bridged system, or a combination thereof. The invention does not encompass scaffold modifications where two independent cycles are linked via a non-cyclic linker, so as to not form a spirane, fused compound, or bridged compound. Preferred bicyclic compounds are fused and bridged compounds. In more preferred embodiments, a bicyclic nucleic acid monomer (BNA) is a bridged nucleic acid monomer. As described herein, both a “bridged” or a “bicylic” nucleic acid monomer relates to a nucleotide with a modified scaffold that enhances the melting temperature of an oligonucleotide against an RNA target as compared to a non-BNA nucleotide-containing control oligonucleotide.

[0040] In a preferred embodiment is provided an oligonucleotide according to the invention, wherein each occurrence of said bicyclic nucleic acid (BNA) scaffold modification results in a monomer that is independently chosen from the group consisting of a conformationally restricted nucleotide (CRN) monomer, a locked nucleic acid (LNA) monomer, a xylo-LNA monomer, an α-LNA monomer, an α-L-LNA monomer, a β-D-LNA monomer, a 2′-amino-LNA monomer, a 2′-(alkylamino)-LNA monomer, a 2′-(acylamino)-LNA monomer, a 2′-N-substituted-2′-amino-LNA monomer, a 2′-thio-LNA monomer, a (2′-O,4′-C) constrained ethyl (cEt) BNA monomer, a (2′-O,4′-C) constrained methoxyethyl (cMOE) BNA monomer, a 2′,4′-BNA^{NC}(N-H) monomer, a 2′,4′-BNA^{NC}(N-Me) monomer, a 2′,4′-BNA^{NC}(N-Bn) monomer, an ethylene-bridged nucleic acid (ENA) monomer, a carba LNA (cLNA) monomer, a 3,4-dihydro-2H-pyran nucleic acid (DpNA) monomer, a 2′-C-bridged bicyclic nucleotide (CBBN) monomer, a heterocyclic-bridged BNA monomer (such as triazolyl or tetrazolyl-linked), an amido-bridged BNA monomer, an urea-bridged BNA monomer, a sulfonamide-bridged BNA monomer, a bicyclic carbocyclic nucleotide monomer, a TriNA monomer, an α-L-TriNA monomer, a bicyclo DNA (bcDNA) monomer, an F-bcDNA monomer, a tricyclo DNA (tcDNA) monomer, an F-tcDNA monomer, an oxetane nucleotide monomer, a locked PMO monomer derived from 2′-amino-LNA, a guanidine-bridged nucleic acid (GuNA) monomer, a spirocyclopropylene-bridged nucleic acid (scpBNA) monomer, and derivatives thereof. It is also encompassed by the invention to introduce more than one distinct scaffold BNA modification in said oligonucleotide. More preferably, each occurrence of said BNA scaffold modification results in a monomer that is independently chosen from the group consisting of a conformationally restrained nucleotide (CRN) monomer, a locked nucleic acid (LNA) monomer, a xylo-LNA monomer, an α-L-LNA monomer, a β-D-LNA monomer, a 2′-amino-LNA monomer, a 2′-(alkylamino)-LNA monomer, a 2′-(acylamino)-LNA monomer, a 2′-N-substituted-2′-amino-LNA monomer, a (2′-O,4′-C) constrained ethyl (cEt) LNA monomer, a (2′-O,4′-C) constrained methoxyethyl (cMOE) BNA monomer, a 2′,4′-BNA^{NC}(N-H) monomer, a 2′,4′-BNA^{NC}(N-Me) monomer, an ethylene-bridged nucleic acid (ENA) monomer, a 2′-C-bridged bicyclic nucleotide (CBBN) monomer, and derivatives thereof. In preferred embodiments, the BNA scaffold modification results in an LNA monomer, an ENA monomer, a cEt BNA monomer, an oxo-CBBN monomer, a 2′-amino-LNA monomer, or a cMOE BNA monomer. In highly preferred embodiments, the BNA scaffold modification results in an LNA monomer, an ENA monomer, a cEt BNA monomer, or a cMOE BNA monomer. Most preferably, the BNA scaffold modification results in an LNA monomer.

[0041] Throughout this application, any monomer comprising a BNA scaffold modification can be replaced by any other monomer comprising a BNA modification, preferably while preserving the nucleobase or modified nucleobase thereof. In other words, the scaffold modifications could be exchanged, while preserving the sequence of the oligonucleotide. As a non-limiting example, an LNA monomer comprising an adenine could be replaced by an ENA monomer comprising an adenine.

[0042] Structural examples of monomers comprising these BNA scaffold modifications are shown below, where B is a base as defined earlier herein, X is a variable such as a heteroatom or a methylene moiety, X₂is a hydroxyl moiety or another 2′-substitution as defined earlier herein, and L is a backbone linkage as described earlier herein. In the literature, the naming of such modifications is often arbitrary and does not follow a uniform convention - in this application, the names as provided below are intended to refer to the structures provided below. For comparison, the cyclic scaffold of a conventional RNA monomer is shown first. In the structures shown below, monomers are typically depicted as 3′-terminal monomers. When chirality is not indicated, each enantiomer is individually referenced. The invention is not limited to this kind of monomers which are provided for illustrative purposes. Heteroatoms comprised in a cyclic moiety can be substituted by other heteroatoms.

[chemical structure]

[chemical structure]

[chemical structure]

[chemical structure]

[chemical structure]

[chemical structure]

[chemical structure]

[chemical structure]

[chemical structure]

[chemical structure]

[chemical structure]

[chemical structure]

[chemical structure]

[chemical structure]

[chemical structure]

[chemical structure]

[chemical structure]

[chemical structure]

[chemical structure]

[chemical structure]

[chemical structure]

[chemical structure]

[chemical structure]

[chemical structure]

[chemical structure]

[chemical structure]

[chemical structure]

[chemical structure]

[chemical structure]

[chemical structure]

[chemical structure]

[chemical structure]

[chemical structure]

[chemical structure]

[chemical structure]

[0043] The following is a non-exhaustive overview of literature references for BNA scaffold modifications shown above: cEt (2′-O,4′-C constrained ethyl) LNA (doi: 10.1021/ja710342q), cMOE (2′-O,4′-C constrained methoxyethyl) LNA (Seth et al., J. Org. Chem. 2010, 75, 1569-1581), 2′,4′-BNA^{NC}(N-H), 2′,4′-BNA^{NC}(N-Me), ethylene-bridged nucleic acid (ENA) (doi: 10.1093/nass/1.1.241), carba LNA (cLNA) (doi: 10.1021/jo100170g), DpNA (Osawa et al., J. Org. Chem., 2015, 80 (21), pp 10474-10481), 2′-C-bridged bicyclic nucleotide (CBBN, as in e.g. WO 2014/145356 (MiRagen Therapeutics)), heterocyclic-bridged LNA (as in e.g. WO 2014/126229 (Mitsuoka Y et al.)), amido-bridged LNA (as in e.g. Yamamoto et al. Org. Biomol. Chem. 2015, 13, 3757), urea-bridged LNA (as in e.g. Nishida et al. Chem. Commun. 2010, 46, 5283), sulfonamide-bridged LNA (as in e.g. WO 2014/112463 (Obika S et al.)), bicyclic carbocyclic nucleosides (as in e.g. WO 2015/142910 (Ionis Pharmaceuticals)), TriNA (Hanessian et al., J. Org. Chem., 2013, 78 (18), pp 9064-9075), α-L-TriNA, bicyclo DNA (bcDNA) (Bolli et al., Chem Biol. 1996 Mar;3(3):197-206), F-bcDNA (DOI: 10.1021/jo402690j), tricyclo DNA (tcDNA) (Murray et al., Nucl. Acids Res., 2012, Vol. 40, No. 13 6135-6143), F-tcDNA (doi: 10.1021/acs.joc.5b00184), an oxetane nucleotide monomer (Nucleic Acids Res. 2004, 32, 5791-5799), scpNA (Horiba et al., J. Org. Chem. 2016, doi: 10.1021/acs.joc.6b02036, GuNA (Shrestha et al., Chem. Commun. 2014, doi: 10.1039/C3CC46017G). For those not mentioned above, reference is made to WO 2011/097641 (ISIS/Ionis Pharmaceuticals) and WO2016/017422 (Osaka University), which are incorporated in their entirety by reference.

[0044] An oligonucleotide of the invention comprising a BNA and a 5-methylcytosine and/or a 5-methyluracil base means that at least one of the scaffolds of said oligonucleotide has been modified by substitution with a BNA, in combination with at least one of the cytosine nucleobases of said oligonucleotide being modified by substitution of the hydrogen at the 5-position of the pyrimidine ring with a methyl group, i.e. a 5-substituted cytosine, and/or that at least one of the uracil nucleobases of said oligonucleotide has been modified by substitution of the proton at the 5-position of the pyrimidine ring with a methyl group (i.e. a 5-methyluracil), respectively. Within the context of the invention, the expression “the substitution of a hydrogen with a methyl group in position 5 of the pyrimidine ring” may be replaced by the expression “the substitution of a pyrimidine with a 5-methylpyrimidine,” with pyrimidine referring to only uracil, only cytosine, or both. If said oligonucleotide comprises 1, 2, 3, 4, 5, 6, 7, 8, 9, or more cytosines and/or uracils, at least one, 2, 3, 4, 5, 6, 7, 8 9, or more cytosines and/or uracils respectively have been modified this way. Preferably all cytosines and/or uracils have been modified this way or substituted by 5-methylcytosine and/or 5-methyluracil respectively. Needless to say, the invention could therefore only be applied to oligonucleotides comprising at least one cytosine or uracil, respectively, in their sequence.

[0045] Preferably, an oligonucleotide according to the invention comprises RNA monomers, as RNA/RNA duplexes are very stable. It is preferred that an RNA oligonucleotide comprises a modification providing the RNA with an additional property, for instance resistance to endonucleases, exonucleases, and RNaseH, additional hybridisation strength, increased stability (for instance in a bodily fluid), increased or decreased flexibility, increased activity, reduced toxicity, increased intracellular transport, increased cellular uptake, tissue-specificity, etc. In addition, the mRNA complexed with the oligonucleotide of the invention is preferably not susceptible to RNaseH cleavage. Preferred modifications have been identified above.

[0046] Accordingly, the invention provides an oligonucleotide comprising a 2′-O-methyl phosphorothioate RNA monomer or consisting of 2′-O-methyl phosphorothioate RNA and comprising a BNA with or without a 5-methylpyrimidine base. Most preferably, this oligonucleotide consists of 2′-O-methyl RNA monomers connected through a phosphorothioate or phosphate backbone and all of its cytosines and/or all of its uracils, independently, have been substituted by 5-methylcytosine and/or 5-methyluracil, respectively, and at least one 2′-O-methyl scaffold has been replaced by a BNA. Thus, an oligonucleotide of the invention may have, in the addition of having at least one BNA scaffold modification:
[0047] At least one and preferably all cytosines substituted with 5-methylcytosines,
[0048] At least one and preferably all cytosines substituted with 5-methylcytosines and at least one uracil substituted with 5-methyluracil,
[0049] At least one uracil substituted with 5-methyluracil.

[0050] In preferred embodiments of this aspect is provided the oligonucleotide as described above, wherein said oligonucleotide comprises 1, 2, 3, 4, 5, or 6 monomers that comprise a bicyclic nucleic acid (BNA) scaffold modification, preferably a bridged nucleic acid scaffold modification.

[0051] In these embodiments, it is preferred that at least one BNA scaffold modification is comprised in a terminal monomer of the oligonucleotide, preferably in the 5′-terminal monomer. It is most preferred that both terminal monomers comprise a BNA scaffold. As such, a more preferred embodiment of this aspect provides the oligonucleotide according to the invention wherein at least one bicyclic nucleic acid (BNA) scaffold modification is comprised in a terminal monomer of said oligonucleotide, preferably in the 5′-terminal monomer of said oligonucleotide, more preferably in both terminal monomers of said oligonucleotide. Other preferred embodiments entail that a terminal monomer and its neighbouring monomer each comprise a BNA scaffold. In such a case, the first two monomers or the last two monomers of an oligonucleotide each comprise a BNA scaffold. This can be combined in any way, so that for example the first and the last two monomers, or the first two and the last monomer all comprise a BNA scaffold. When an oligonucleotide according to the invention comprises a terminal monomer comprising a BNA scaffold, additional monomers with a BNA scaffold are preferably either at the other terminus, or adjacent to terminal monomers with a BNA scaffold.

[0052] A preferred embodiment of this aspect provides the oligonucleotide of the invention, wherein said oligonucleotide comprises BNA modifications as selected from the set consisting of:
[0053] a single BNA scaffold modification in the monomer at the 5′-terminus,
[0054] a single BNA scaffold modification in the monomer at the 3′-terminus,
[0055] two BNA scaffold modifications where one is in the monomer at the 5′-terminus and the other is in the monomer at the 3′-terminus,
[0056] two BNA scaffold modifications, one in each of the two monomers that are closest to the 5′-terminus,
[0057] two BNA scaffold modifications, one in each of the two monomers that are closest to the 3′-terminus,
[0058] three to seven BNA scaffold modifications, where one is in the monomer at the 5′-terminus, one is in the monomer at the 3′-terminus, and 1-5 BNA scaffold modifications are in non-terminal residues,
[0059] three to six BNA scaffold modifications, where one is in the monomer at the 5′-terminus, one is in the monomer at the 3′-terminus, and 1-4 BNA scaffold modifications are in non-terminal residues,
[0060] three to five BNA scaffold modifications, where one is in the monomer at the 5′-terminus, one is in the monomer at the 3′-terminus, and 1-3 BNA scaffold modifications are in non-terminal residues,
[0061] three or four BNA scaffold modifications, where one is in the monomer at the 5′-terminus, one is in the monomer at the 3′-terminus, and one or two BNA scaffold modifications are in non-terminal residues,
[0062] three BNA scaffold modifications, where one is in the monomer at the 5′-terminus, one is in the monomer at the 3′-terminus, and one BNA scaffold modification is in a non-terminal residue,
[0063] four to six BNA scaffold modifications, where one is in the monomer at the 5′-terminus, one is in the monomer at the 3′-terminus, and 2-4 BNA scaffold modifications are in non-terminal residues, and
[0064] four or five BNA scaffold modifications, where one is in the monomer at the 5′-terminus, one is in the monomer at the 3′-terminus, and 2-3 BNA scaffold modifications are in non-terminal residues.

[0065] When an oligonucleotide according to the invention comprises or consists of a sequence represented by SEQ ID NOs: 8, 14, 20, 26, 32, 38, 44, 50, 56, 62, 68, 74, 80, 86, 92, 98, 104, 110, 116, 122, 128, 134, 140, 146, 152, 158, 164, 170, 176, 182, 188, 194, 200, 206, 212, 218, 224, 230, 236, 242, 248, 254, 260, 266, 272, 278, 284, 290, 296, 302, 308, 314, 320, 326, 332, 338, 344, 350, 356, 362, 368, 374, 380, 386, 392, 398, 404, 410, 416, 422, 428, 434, 440, 446, 452, 458, 464, 470, 476, 482, 488, 494, 500, 506, 512, 518, 524, 530, 536, 542, 548, 554, 560, 566, 572, 578, 584, 590, 596, 602, 608, 614, 620, 626, 632, 638, 644, 650, 656, 662, 668, 674, 680, 686, 692, 698, 704, 710, 716, 722, 728, 734, 740, 746, 752, 758, 764, 770, 776, 782, 788, 794, 800, 806, 812, 818, 824, 830, 836, 842, 848, 854, 860, 866, 872, 878, 884, 890, 896, 902, 908, 914, 920, 926, 932, 938, 944, 950, 956, 962, 968, 974, 980, 986, 992, 998, 1004, 1010, 1016, 1022, 1028, 1034, 1040, 1046, 1052, 1058, 1064, 1070, 1076, 1082, 1088, 1094, 1100, 1106, 1112, 1118, 1124, 1130, 1136, 1142, 1148, 1154, 1160, 1166, 1172, 1178, 1184, 1190, 1196, 1202, 1208, 1214, 1220, 1226, 1232, 1238, 1244, 1250, 1256, 1262, 1268, 1274, 1280, 1286, 1292, 1298, 1304, 1310, 1316, 1322, 1328, 1334, 1340, 1346, 1352,▫1358, 1364, 1370, 1376, 1382, 1388, 1394, 1400, 1406, 1412, 1418, 1424, 1430, 1436, 1442,▫1448, 1454, 1460, 1466, 1472, 1478, 1484, 1490, 1496, 1502, 1508, 1514, 1520, 1526, 1532,▫1538, 1544, 1550, 1556, 1562, 1568, 1574, or 1580, preferably at least one BNA scaffold modifications is comprised in said oligonucleotide.

[0066] When an oligonucleotide according to the invention comprises or consists of a sequence represented by SEQ ID NOs: 9, 15, 21, 27, 33, 39, 45, 51, 57, 63, 69, 75, 81, 87, 93, 99, 105, 111, 117, 123, 129, 135, 141, 147, 153, 159, 165, 171, 177, 183, 189, 195, 201, 207, 213, 219, 225, 231, 237, 243, 249, 255, 261, 267, 273, 279, 285, 291, 297, 303, 309, 315, 321, 327, 333, 339, 345, 351, 357, 363, 369, 375, 381, 387, 393, 399, 405, 411, 417, 423, 429, 435, 441, 447, 453, 459, 465, 471, 477, 483, 489, 495, 501, 507, 513, 519, 525, 531, 537, 543, 549, 555, 561, 567, 573, 579, 585, 591, 597, 603, 609, 615, 621, 627, 633, 639, 645, 651, 657, 663, 669, 675, 681, 687, 693, 699, 705, 711, 717, 723, 729, 735, 741, 747, 753, 759, 765, 771, 777, 783, 789, 795, 801, 807, 813, 819, 825, 831, 837, 843, 849, 855, 861, 867, 873, 879, 885, 891, 897, 903, 909, 915, 921, 927, 933, 939, 945, 951, 957, 963, 969, 975, 981, 987, 993, 999, 1005, 1011, 1017, 1023, 1029, 1035, 1041, 1047, 1053, 1059, 1065, 1071, 1077, 1083, 1089, 1095, 1101, 1107, 1113, 1119, 1125, 1131, 1137, 1143, 1149, 1155, 1161, 1167, 1173, 1179, 1185, 1191, 1197, 1203, 1209, 1215, 1221, 1227, 1233, 1239, 1245, 1251, 1257, 1263, 1269, 1275, 1281, 1287, 1293, 1299, 1305, 1311, 1317, 1323, 1329, 1335, 1341, 1347, 1353, 1359, 1365, 1371, 1377, 1383, 1389, 1395, 1401, 1407, 1413, 1419, 1425, 1431, 1437, 1443, 1449, 1455, 1461, 1467, 1473, 1479, 1485, 1491, 1497, 1503, 1509, 1515, 1521, 1527, 1533, 1539, 1545, 1551, 1557, 1563, 1569, or 1575, preferably only the 5′-terminal monomer of said oligonucleotide comprises a BNA scaffold modification.

[0067] When an oligonucleotide according to the invention comprises or consists of a sequence represented by SEQ ID NOs: 10, 16, 22, 28, 34, 40, 46, 52, 58, 64, 70, 76, 82, 88, 94, 100, 106, 112, 118, 124, 130, 136, 142, 148, 154, 160, 166, 172, 178, 184, 190, 196, 202, 208, 214, 220, 226, 232, 238, 244, 250, 256, 262, 268, 274, 280, 286, 292, 298, 304, 310, 316, 322, 328, 334, 340, 346, 352, 358, 364, 370, 376, 382, 388, 394, 400, 406, 412, 418, 424, 430, 436, 442, 448, 454, 460, 466, 472, 478, 484, 490, 496, 502, 508, 514, 520, 526, 532, 538, 544, 550, 556, 562, 568, 574, 580, 586, 592, 598, 604, 610, 616, 622, 628, 634, 640, 646, 652, 658, 664, 670, 676, 682, 688, 694, 700, 706, 712, 718, 724, 730, 736, 742, 748, 754, 760, 766, 772, 778, 784, 790, 796, 802, 808, 814, 820, 826, 832, 838, 844, 850, 856, 862, 868, 874, 880, 886, 892, 898, 904, 910, 916, 922, 928, 934, 940, 946, 952, 958, 964, 970, 976, 982, 988, 994, 1000, 1006, 1012, 1018, 1024, 1030, 1036, 1042, 1048, 1054, 1060, 1066, 1072, 1078, 1084, 1090, 1096, 1102, 1108, 1114, 1120, 1126, 1132, 1138, 1144, 1150, 1156, 1162, 1168, 1174, 1180, 1186, 1192, 1198, 1204, 1210, 1216, 1222, 1228, 1234, 1240, 1246, 1252, 1258, 1264, 1270, 1276, 1282, 1288, 1294, 1300, 1306, 1312, 1318, 1324, 1330, 1336, 1342, 1348, 1354, 1360, 1366, 1372, 1378, 1384, 1390, 1396, 1402, 1408, 1414, 1420, 1426, 1432, 1438, 1444, 1450, 1456, 1462, 1468, 1474, 1480, 1486, 1492, 1498, 1504, 1510, 1516, 1522, 1528, 1534, 1540, 1546, 1552, 1558, 1564, 1570, or 1576, preferably only the 3′-terminal monomer of said oligonucleotide comprises a BNA scaffold modification.

[0068] When an oligonucleotide according to the invention comprises or consists of a sequence represented by SEQ ID NOs: 11, 17, 23, 29, 35, 41, 47, 53, 59, 65, 71, 77, 83, 89, 95, 101, 107, 113, 119, 125, 131, 137, 143, 149, 155, 161, 167, 173, 179, 185, 191, 197, 203, 209, 215, 221, 227, 233, 239, 245, 251, 257, 263, 269, 275, 281, 287, 293, 299, 305, 311, 317, 323, 329, 335, 341, 347, 353, 359, 365, 371, 377, 383, 389, 395, 401, 407, 413, 419, 425, 431, 437, 443, 449, 455, 461, 467, 473, 479, 485, 491, 497, 503, 509, 515, 521, 527, 533, 539, 545, 551, 557, 563, 569, 575, 581, 587, 593, 599, 605, 611, 617, 623, 629, 635, 641, 647, 653, 659, 665, 671, 677, 683, 689, 695, 701, 707, 713, 719, 725, 731, 737, 743, 749, 755, 761, 767, 773, 779, 785, 791, 797, 803, 809, 815, 821, 827, 833, 839, 845, 851, 857, 863, 869, 875, 881, 887, 893, 899, 905, 911, 917, 923, 929, 935, 941, 947, 953, 959, 965, 971, 977, 983, 989, 995, 1001, 1007, 1013, 1019, 1025, 1031, 1037, 1043, 1049, 1055, 1061, 1067, 1073, 1079, 1085, 1091, 1097, 1103, 1109, 1115, 1121, 1127, 1133, 1139, 1145, 1151, 1157, 1163, 1169, 1175, 1181, 1187, 1193, 1199, 1205, 1211, 1217, 1223, 1229, 1235, 1241, 1247, 1253, 1259, 1265, 1271, 1277, 1283, 1289, 1295, 1301, 1307, 1313, 1319, 1325, 1331, 1337, 1343, 1349, 1355, 1361, 1367, 1373, 1379, 1385, 1391, 1397, 1403, 1409, 1415, 1421, 1427, 1433, 1439, 1445, 1451, 1457, 1463, 1469, 1475, 1481, 1487, 1493, 1499, 1505, 1511, 1517, 1523, 1529, 1535, 1541, 1547, 1553, 1559, 1565, 1571, or 1577, preferably only both the 5′-terminal monomer and the 3′-terminal monomer of said oligonucleotide comprise a BNA scaffold modification.

[0069] When an oligonucleotide according to the invention comprises or consists of a sequence represented by SEQID NOs: 12, 18, 24, 30, 36, 42, 48, 54, 60, 66, 72, 78, 84, 90, 96, 102, 108, 114, 120, 126, 132, 138, 144, 150, 156, 162, 168, 174, 180, 186, 192, 198, 204, 210, 216, 222, 228, 234, 240, 246, 252, 258, 264, 270, 276, 282, 288, 294, 300, 306, 312, 318, 324, 330, 336, 342, 348, 354, 360, 366, 372, 378, 384, 390, 396, 402, 408, 414, 420, 426, 432, 438, 444, 450, 456, 462, 468, 474, 480, 486, 492, 498, 504, 510, 516, 522, 528, 534, 540, 546, 552, 558, 564, 570, 576, 582, 588, 594, 600, 606, 612, 618, 624, 630, 636, 642, 648, 654, 660, 666, 672, 678, 684, 690, 696, 702, 708, 714, 720, 726, 732, 738, 744, 750, 756, 762, 768, 774, 780, 786, 792, 798, 804, 810, 816, 822, 828, 834, 840, 846, 852, 858, 864, 870, 876, 882, 888, 894, 900, 906, 912, 918, 924, 930, 936, 942, 948, 954, 960, 966, 972, 978, 984, 990, 996, 1002, 1008, 1014, 1020, 1026, 1032, 1038, 1044, 1050, 1056, 1062, 1068, 1074, 1080, 1086, 1092, 1098, 1104, 1110, 1116, 1122, 1128, 1134, 1140, 1146, 1152, 1158, 1164, 1170, 1176, 1182, 1188, 1194, 1200, 1206, 1212, 1218, 1224, 1230, 1236, 1242, 1248, 1254, 1260, 1266, 1272, 1278, 1284, 1290, 1296, 1302, 1308, 1314, 1320, 1326, 1332, 1338, 1344, 1350, 1356, 1362, 1368, 1374, 1380, 1386, 1392, 1398, 1404, 1410, 1416, 1422, 1428, 1434, 1440, 1446, 1452, 1458, 1464, 1470, 1476, 1482, 1488, 1494, 1500, 1506, 1512, 1518, 1524, 1530, 1536, 1542, 1548, 1554, 1560,1566, 1572, or 1578,preferably only the two most 5′-terminal monomers of said oligonucleotide both comprise a BNA scaffold modification.

[0070] When an oligonucleotide according to the invention comprises or consists of a sequence represented by SEQ ID NOs: 13, 19, 25, 31, 37, 43, 49, 55, 61, 67, 73, 79, 85, 91, 97, 103, 109, 115, 121, 127, 133, 139, 145, 151, 157, 163, 169, 175, 181, 187, 193, 199, 205, 211, 217, 223, 229, 235, 241, 247, 253, 259, 265, 271, 277, 283, 289, 295, 301, 307, 313, 319, 325, 331, 337, 343, 349, 355, 361, 367, 373, 379, 385, 391, 397, 403, 409, 415, 421, 427, 433, 439, 445, 451, 457, 463, 469, 475, 481, 487, 493, 499, 505, 511, 517, 523, 529, 535, 541, 547, 553, 559, 565, 571, 577, 583, 589, 595, 601, 607, 613, 619, 625, 631, 637, 643, 649, 655, 661, 667, 673, 679, 685, 691, 697, 703, 709, 715, 721, 727, 733, 739, 745, 751, 757, 763, 769, 775, 781, 787, 793, 799, 805, 811, 817, 823, 829, 835, 841, 847, 853, 859, 865, 871, 877, 883, 889, 895, 901, 907, 913, 919, 925, 931, 937, 943, 949, 955, 961, 967, 973, 979, 985, 991, 997, 1003, 1009, 1015, 1021, 1027, 1033, 1039, 1045, 1051, 1057, 1063, 1069, 1075, 1081, 1087, 1093, 1099, 1105, 1111, 1117, 1123, 1129, 1135, 1141, 1147, 1153, 1159, 1165, 1171, 1177, 1183, 1189, 1195, 1201, 1207, 1213, 1219, 1225, 1231, 1237, 1243, 1249, 1255, 1261, 1267, 1273, 1279, 1285, 1291, 1297, 1303, 1309, 1315, 1321, 1327, 1333, 1339, 1345, 1351, 1357, 1363, 1369, 1375, 1381, 1387, 1393, 1399, 1405, 1411, 1417, 1423, 1429, 1435, 1441, 1447, 1453, 1459, 1465, 1471, 1477, 1483, 1489, 1495, 1501, 1507, 1513, 1519, 1525, 1531, 1537, 1543, 1549, 1555, 1561, 1567, 1573, or 1579,preferably only the two most 3′-terminal monomers of said oligonucleotide both comprise a BNA scaffold modification.

[0071] When an oligonucleotide according to the invention comprises or consists of a sequence represented by a SEQ ID NO that is not SEQ ID NO: 1580, said oligonucleotide preferably comprises 5-methylcytosines instead of cytosines, and said oligonucleotide preferably comprises at least one 2′-O-methyl phosphorothioate monomer, more preferably comprises only 2′-O-methyl phosphorothioate monomers. When an oligonucleotide according to the invention comprises or consists of a sequence represented by SEQ ID NO: 1580, said oligonucleotide preferably comprises cytosines instead of 5-methylcytosines, and said oligonucleotide preferably comprises at least one 2′-O-methyl phosphorothioate monomer, more preferably comprises only 2′-O-methyl phosphorothioate monomers. Whenever a SEQ ID NO references T or U and said monomer comprises a BNA scaffold modification, said monomer (i.e. said reference) can optionally be replaced by U or T, respectively. Whenever a SEQ ID NO references C or 5-methyl-C and said monomer comprises a BNA scaffold modification, said reference can optionally be replaced by 5-methyl-C or C, respectively.

[0072] Throughout this application, a BNA scaffold modification can always be comprised in an oligonucleotide unless explicitly stated otherwise. However, for the sake of legibility, this is not always explicitly spelt out. This means that whenever an oligonucleotide is said to comprise or consist of only a particular kind of monomer, this does not exclude the presence of BNA scaffold modifications in cases where a BNA scaffold modification is mentioned as being present. For example, an oligonucleotide that consists of only 2′-O-methyl RNA monomers can nonetheless comprise a monomer with a BNA scaffold modification. This will be apparent from context (for example, when an AON is said to consist exclusively of one monomer, yet still also comprise a BNA scaffold modification.)

[0073] In preferred embodiments of this aspect is provided the oligonucleotide according to the invention, wherein said oligonucleotide is complementary, preferably reverse complementary to or binds to or targets or hybridizes with at least a part of an exon and/or non-exon region, preferably wherein said oligonucleotide comprises or consists of a sequence which is complementary to or binds or targets or hybridizes at least a part of an exon recognition sequence (ERS), an exonic splicing silencer (ESS), an intronic splicing silencer (ISS), an SR protein binding site, or another splicing element, signal, or structure. When such an oligonucleotide is complementary, it is understood that it can also be reverse complementary. In this application, the term “complementary” encompasses both forward complementary and reverse complementary sequences, as will be apparent to a skilled person from the context.

[0074] In this context, preferred sequences to which the oligonucleotide according to the invention is complementary, or to which it binds, or which it targets, or which it hybridizes with, are dystrophin exons, such as dystrophin pre-mRNA exons 2 to 78. Preferred dystrophin exons are exons 2 to 78, more preferably exons 10 to 60, most preferably exons 44 to 55 and preferred non-exon regions are introns 1 to 78. More preferred exons to which the oligonucleotide is complementary, or to which it binds, or which it targets, or with which it hybridizes, are dystrophin pre-mRNA exons 44, 45, 51, 52, 53 and 55. Preferred exons to which the oligonucleotide is complementary, or to which it binds, or which it targets, or with which it hybridizes, are dystrophin pre-mRNA exons 44, 45, 51, 52, 53 and 55. Most preferably, such an oligonucleotide hybridizes with at least a part of a dystrophin pre-mRNA exon chosen from exons 44, 45, 51, 52, 53 and 55, and has a length of 10 to 33 nucleotides, more preferably of 16 to 22 nucleotides. Accordingly, in a preferred embodiment is provided an oligonucleotide according to the invention wherein said oligonucleotide is complementary, preferably reverse complementary to at least part of an exon and/or non-exon region, wherein said at least part of an exon and/or non-exon region has a length of 10 to 33 nucleotides, preferably of 16 to 22 nucleotides. More preferably, said at least part of an exon and/or non-exon region has a length of at least 10, 11, 12, 13, 14, 15, 16, 17, 18, 19, 20, 21, 22, 23 24, 25, 26, 27, 28, 29, 30, 31, 32, or 33 nucleotides. Accordingly, it is preferred that said at least part of an exon and/or non-exon region has a length of at most 33, 32, 31, 30, 29, 28, 27, 26, 25, 24, 23, 22, 21, 20, 19, 18, 17, 16, 15, 14, 13, 12, 11, or 10 nucleotides. Most preferred lengths are 16, 17, 18, 19, 20, 21, or 22 nucleotides.

[0075] Additionally, in this context, other preferred sequences to which the oligonucleotide according to the invention is complementary, or to which it binds, or which it targets, or which it hybridizes with, are SMN2 splicing regulatory elements, preferably such as those in introns 6 and 7, more preferably such as the splicing silencer ISS-N1 in intron 7.

[0076] Accordingly, in a preferred embodiment is provided an oligonucleotide according to the invention, wherein said exon and/or non-exon region is in a DMD gene or in an SMN gene. An SMN gene can be an SMN1 gene or an SMN2 gene, preferably an SMN2 gene.

[0077] Preferably, an oligonucleotide of the invention is represented by a nucleotide sequence comprising or consisting of a sequence that is capable of binding to, targeting or being complementary to a part of an exon of dystrophin pre-mRNA. Said binding or targeted part may be at least 50% of the length of the oligonucleotide of the invention, or at least 60%, or at least 70%, or at least 80%, or at least 90% or at least 95%, or 98% and up to 100%. An oligonucleotide may be represented by a nucleotide sequence, said nucleotide sequence comprising a sequence that binds, targets, or is complementary to at least a part of dystrophin pre-mRNA as defined herein and additional flanking sequences. In a more preferred embodiment, the length of said binding or targeted part of said oligonucleotide is of at least 10, 11, 12, 13, 14, 15, 16, 17, 18, 19, 20, 21, 22, 23, 24, 25, 26, 27, 28, 29, 30, 31, 32, or 33 nucleotides. Several types of flanking sequences may be used. Preferably, flanking sequences are used to modify the binding of a protein to said oligonucleotide, or to modify a thermodynamic property of said oligonucleotide, more preferably to modify target RNA binding affinity. In another preferred embodiment, additional flanking sequences are complementary to sequences of the dystrophin pre-mRNA which are not present in said exon. Such flanking sequences are preferably capable of binding to or targeting sequences comprising or consisting of the branchpoint and/or the splice site acceptor or donor consensus sequences of said exon. In a preferred embodiment, such flanking sequences are capable of binding to or targeting sequences comprising or consisting of sequences of an intron of the dystrophin pre-mRNA which is adjacent to said exon.

[0078] Preferred oligonucleotides according to the invention are those wherein said oligonucleotide is represented by a nucleotide sequence comprising or consisting of SEQ ID NO: 8-1580 or SEQ ID NO: 1592-1607, or by a nucleotide sequence comprising or consisting of a fragment of SEQ ID NO: 8-1580 or SEQ ID NO: 1592-1607, preferably wherein said oligonucleotide is represented by a nucleotide sequence comprising or consisting of SEQ ID NO:453-613 or SEQ ID NO: 1592-1605 or SEQ ID NO: 1607, or by a nucleotide sequence comprising or consisting of a fragment of SEQ ID NO: 453-613 or SEQ ID NO 1592-1605 or SEQ ID NO: 1607, more preferably wherein said oligonucleotide is represented by a nucleotide sequence comprising or consisting of SEQ ID NO: 453, 455, 456, 459, 461, 462, 465, 467, 468, 471, 473, 474, 486, 483, 1592, 1593, 1594, 1595, 1596, 1597, 1598, 1599, 1600, 1601, 1602, 1603, 1604, 1605, or 1607 or by a nucleotide sequence comprising or consisting of a fragment of SEQ ID NO: 453, 455, 456, 459, 461, 462, 465, 467, 468, 471, 473, 474, 486, 483 1592, 1593, 1594, 1595, 1596, 1597, 1598, 1599, 1600, 1601, 1602, 1603, 1604, 1605, or 1607. Within the context of the invention, a fragment of a SEQ ID NO preferably means a nucleotide sequence comprising or consisting of at least 10 contiguous nucleotides from said SEQ ID NO.

[0079] More preferred oligonucleotides according to the invention are those wherein said oligonucleotide is represented by a nucleotide sequence comprising or consisting of SEQ ID NO: 8-1580 or SEQ ID NO: 1592-2099 or SEQ ID NO: 3000-6048, or by a nucleotide sequence comprising or consisting of a fragment of SEQ ID NO: 8-1580 or SEQ ID NO: 1592-2099 or SEQ ID NO: 3000-6048, more preferably wherein said oligonucleotide is represented by a nucleotide sequence comprising or consisting of SEQ ID NOs: 455, 459, 4528, 4531, 4532, 4533, 4535, 4542, 4548, or 4568, or by a nucleotide sequence comprising or consisting of a fragment of SEQ ID NOs: 455, 459, 4528, 4531, 4532, 4533, 4535, 4542, 4548, or 4568.

[0080] More preferred oligonucleotides according to the invention are those wherein said oligonucleotide is represented by a nucleotide sequence comprising or consisting of SEQ ID NO: 8-1580 or SEQ ID NO: 1592-2099 or SEQ ID NO: 3000-6048, or by a nucleotide sequence comprising or consisting of a fragment of SEQ ID NO: 8-1580 or SEQ ID NO: 1592-2099 or SEQ ID NO: 3000-6048, preferably wherein said oligonucleotide is represented by a nucleotide sequence comprising or consisting of SEQ ID NO: 453, 455, 456, 459, 461, 462, 465, 467, 468, 471, 473, 474, 483, or 486, or by a nucleotide sequence comprising or consisting of a fragment of SEQ ID NO: 453, 455, 456, 459, 461, 462, 465, 467, 468, 471, 473, 474, 483, or 486, more preferably wherein said oligonucleotide is represented by a nucleotide sequence comprising or consisting of SEQ ID NO: 452-613, 4528-4572, or by a nucleotide sequence comprising or consisting of a fragment of SEQ ID NO: 452-613, 4528-4572, most preferably wherein said oligonucleotide is represented by a nucleotide sequence comprising or consisting of SEQ ID NO: 455, 459, 4528, 4531, 4532, 4533, 4535, 4542, 4548, or 4568, or by a nucleotide sequence comprising or consisting of a fragment of SEQ ID NO: 455, 459, 4528, 4531, 4532, 4533, 4535, 4542, 4548, or 4568.

[0081] Preferred AONs are those wherein said oligonucleotide induces pre-mRNA splicing modulation, preferably said pre-mRNA splicing modulation alters production or composition of protein, which preferably comprises exon skipping or exon inclusion, wherein said pre-mRNA splicing modulation most preferably comprises exon skipping. This pre-mRNA splicing modulation is preferably used in the context of a therapeutic application as later defined herein.

[0082] The objective of pre-mRNA splicing modulation can be to alter production of protein, most often the protein the RNA codes for. This production can be altered through increase or decrease of the level of said production. This production can also be altered through alteration of the composition of the protein that is actually produced, for example when pre-mRNA splicing modulation results in inclusion or exclusion of one or more exons, and in a protein that has a different amino acid sequence. Preferably, such a protein with a different amino acid sequence has more functionality, or has a better functionality, or has at least one altered property, than the protein that is produced as a result of the disease or condition.

[0083] In the case of DMD, pre-mRNA splicing modulation can be applied to skip one or more specific exons in the dystrophin pre-mRNA in order to restore the open reading frame of the transcript and to induce the expression of a shorter but (more) functional dystrophin protein, with the ultimate goal to be able to interfere with the course of the disease. Similar strategies allow interference with the course of BMD. In the case of SMA pre-mRNA splicing modulation can be applied to enhance inclusion of exon 7 in the SMN2 gene and to increase levels of the survival of motor neuron protein, which decreases loss of motor neurons in the spinal cord and subsequent atrophy of voluntary muscles. As such, in a preferred embodiment is provided an oligonucleotide according to the invention, wherein said oligonucleotide induces pre-mRNA splicing modulation, wherein said pre-mRNA splicing modulation alters production of protein that is related to a disease or a condition, preferably wherein said disease or condition is Duchenne Muscular Dystrophy (DMD), Becker Muscular Dystrophy (BMD), or Spinal Muscular Atrophy (SMA).

[0084] Preferably, an AON is for use in the splicing modulation of a therapeutic pre-mRNA. An AON is preferably an oligonucleotide which is complementary to a specific sequence of the dystrophin or SMN2 pre-mRNA derived from the coding strand of a DNA of an individual. This oligonucleotide binds to or targets said sequence of said pre-mRNA. In the context of the invention, a therapeutic pre-mRNA may be called a diseased pre-mRNA of a gene involved in a genetic disease. Modulation of the splicing of a therapeutic pre-mRNA therefore allows the treatment of said genetic disease.

[0085] In the case of DMD or of BMD, pre-mRNA splicing modulation can be applied to skip one or more specific exons in the dystrophin pre-mRNA in order to restore the open reading frame of the transcript and to induce the expression of a shorter but (more) functional dystrophin protein, with the ultimate goal to be able to delay or even stop progression of the disease.

[0086] In a preferred embodiment, an oligonucleotide of the invention is used for inducing exon-skipping in the dystrophin pre-mRNA in a cell, in an organ, in a tissue and/or in an individual. Exon-skipping results in a mature dystrophin mRNA that does not contain a skipped exon and thus, when said exon codes for amino acids, can lead to the expression of a shorter protein product. The skipping of at least one exon is preferably induced by the binding of an AON to specific exon-internal sequences comprising splicing regulatory elements, the splice sites and/or intronic branchpoint sequences.

[0087] In a preferred embodiment, the invention also encompasses oligonucleotides as described above that are suitable for the skipping of multiple exons, sometimes referred to as multiskipping. Such an oligonucleotide according to the invention is capable of binding to a region of a first exon and to a region of a second exon within the same pre-mRNA, wherein said region of said second exon has at least 50% identity with said region of said first exon. These oligonucleotides are preferably capable of inducing the skipping of said first exon and said second exon of said pre-mRNA. Preferably, the skipping of additional exon(s) is also induced, wherein said additional exon(s) is/are preferably located in between said first and said second exon. The resulting transcript of said pre-mRNA, wherein said exons are skipped, is in-frame. More details of such oligonucleotides are provided in WO2014007620.

[0088] As defined herein a DMD pre-mRNA preferably means a pre-mRNA of a DMD gene coding for a dystrophin protein. A mutated DMD pre-mRNA corresponds to a pre-mRNA of a BMD or DMD patient with a mutation when compared to a wild type DMD pre-mRNA of a non-affected person, resulting in (reduced levels of) an aberrant protein (BMD), or in the absence of functional dystrophin (DMD). A DMD pre-mRNA is also named a dystrophin pre-mRNA. A DMD gene may also be named a dystrophin gene. Dystrophin and DMD may be used interchangeably throughout the application.

[0089] A patient is preferably intended to mean a patient having DMD or BMD as later defined herein or a patient susceptible to develop DMD or BMD due to his or her genetic background. In the case of a DMD patient, an oligonucleotide used will preferably correct one mutation as present in the DMD gene of said patient and create a protein that will look like a BMD protein: said protein will preferably be a functional or semi-functional dystrophin as later defined herein. In the case of a BMD patient, an oligonucleotide as used will preferably correct one mutation as present in the BMD gene of said patient and create a dystrophin which will be more functional than the dystrophin which was originally present in said BMD patient.

[0090] As defined herein, a functional dystrophin is preferably a wild type dystrophin corresponding to a protein having the amino acid sequence as identified in SEQ ID NO: 1. As defined herein, a semi-functional dystrophin is preferably a BMD-like dystrophin corresponding to a protein having an acting binding domain in its N terminal part (first 240 amino acids at the N terminus), a cysteine-rich domain (amino acid 3361 till 3685) and a C terminal domain (last 325 amino acids at the C terminus) each of these domains being present in a wild type dystrophin as known to the skilled person. The amino acids indicated herein correspond to amino acids of the wild type dystrophin being represented by SEQ ID NO:1. In other words, a functional or a semi-functional dystrophin is a dystrophin which exhibits at least to some extent an activity of a wild type dystrophin. “At least to some extent” preferably means at least 10%, 20%, 30%, 40%, 50%, 60%, 70%, 80%, 90%, 95% or 100% of a corresponding activity of a wild type functional dystrophin. In this context, an activity of a functional dystrophin is preferably binding to actin and to the dystrophin-associated glycoprotein complex (DGC or DAPC) (Ehmsen J et al, 2002).

[0091] Binding of dystrophin to actin and to the DGC or DAPC complex may be visualized by either co-immunoprecipitation using total protein extracts or immunofluorescence analysis of cross-sections using various antibodies reacting with the different members of the complex, from a control (non-DMD) biopsy of one from a muscle suspected to be dystrophic, pre- and/or post-treatment, as known to the skilled person.

[0092] Individuals or patients suffering from Duchenne muscular dystrophy typically have a mutation in the gene encoding dystrophin (the DMD or dystrophin gene) that prevents synthesis of the complete protein, i.e. a premature stop codon prevents the synthesis of the C-terminus. In Becker muscular dystrophy the dystrophin gene also comprises a mutation compared to the wild type but the mutation does typically not result in a premature stop codon and the C-terminus is typically synthesized. As a result a functional or semi-functional dystrophin protein is synthesized that has at least the same activity in kind as the wild type protein, although not necessarily the same amount of activity. The genome of a BMD patient typically encodes a dystrophin protein comprising the N terminal part (first 240 amino acids at the N terminus), a cysteine-rich domain (amino acid 3361 till 3685) and a C-terminal domain (last 325 amino acids at the C-terminus) but in the majority of cases its central rod shaped domain is shorter than the one of a wild type dystrophin (Monaco et al., 1988). Antisense oligonucleotide-induced exon skipping for the treatment of DMD is typically directed to overcome a premature stop in the pre-mRNA by skipping an exon, preferably in the central rod-domain shaped domain, to correct the open reading frame and allow synthesis of remainder of the dystrophin protein including the C-terminus, albeit that the protein is somewhat smaller as a result of a smaller rod domain. In a preferred embodiment, an individual having DMD and being treated by an oligonucleotide as defined herein will be provided a dystrophin which exhibits at least to some extent an activity of a wild type dystrophin. More preferably, if said individual is a Duchenne patient or is suspected to be a Duchenne patient, a functional or a semi-functional dystrophin is a dystrophin of an individual having BMD: typically said dystrophin is able to interact with both actin and the DGC or DAPC, but its central rod shaped domain may be shorter than the one of a wild type dystrophin (Monaco et al., 1988). The central rod domain of wild type dystrophin comprises 24 spectrin-like repeats. For example, a central rod shaped domain of a dystrophin as provided herein may comprise 5 to 23, 10 to 22 or 12 to 18 spectrin-like repeats as long as it can bind to actin and to DGC.

[0093] Alleviating one or more symptom(s) of Duchenne Muscular Dystrophy or Becker Muscular Dystrophy in an individual using an oligonucleotide of the invention may be assessed by any of the following assays: prolongation of time to loss of walking, improvement of muscle strength, improvement of the ability to lift weight, improvement of the time taken to rise from the floor, improvement in the nine-meter walking time, improvement in the time taken for four-stairs climbing, improvement of the leg function grade, improvement of the pulmonary function, improvement of cardiac function, improvement of the quality of life. Each of these assays is known to the skilled person. As an example, the publication of Manzur et al. (2008), gives an extensive explanation of each of these assays. For each of these assays, as soon as a detectable improvement or prolongation of a parameter measured in an assay has been found, it will preferably mean that one or more symptoms of Duchenne Muscular Dystrophy or Becker Muscular Dystrophy has been alleviated in an individual using an oligonucleotide of the invention. Detectable improvement or prolongation is preferably a statistically significant improvement or prolongation as described in Hodgetts et al. (2006). Alternatively, the alleviation of one or more symptom(s) of Duchenne Muscular Dystrophy or Becker Muscular Dystrophy may be assessed by measuring an improvement of a muscle fiber function, integrity and/or survival. In a preferred method, one or more symptom(s) of a DMD or a BMD patient is/are alleviated and/or one or more characteristic(s) of one or more muscle cells from a DMD or a BMD patient is/are improved. Such symptoms or characteristics may be assessed at the cellular, tissue level or on the patient self.

[0094] An alleviation of one or more characteristics of a muscle cell from a patient may be assessed by any of the following assays on a myogenic cell or muscle cell from a patient: reduced calcium uptake by muscle cells, decreased collagen synthesis, altered morphology, altered lipid biosynthesis, decreased oxidative stress, and/or improved muscle fiber function, integrity, and/or survival. These parameters are usually assessed using immunofluorescence and/or histochemical analyses of cross sections of muscle biopsies.

[0095] The improvement of muscle fiber function, integrity and/or survival may be assessed using at least one of the following assays: a detectable decrease of creatine kinase in blood, a detectable decrease of necrosis of muscle fibers in a biopsy cross-section of a muscle suspected to be dystrophic, and/or a detectable increase of the homogeneity of the diameter of muscle fibers in a biopsy cross-section of a muscle suspected to be dystrophic. Each of these assays is known to the skilled person.

[0096] Creatine kinase may be detected in blood as described in Hodgetts et al. (2006). A detectable decrease in creatine kinase may mean a decrease of 5%, 10%, 20%, 30%, 40%, 50%, 60%, 70%, 80%, 90% or more compared to the concentration of creatine kinase in a same DMD or BMD patient before treatment.

[0097] A detectable decrease of necrosis of muscle fibers is preferably assessed in a muscle biopsy, more preferably as described in Hodgetts et al. (2006), using biopsy cross-sections. A detectable decrease of necrosis may be a decrease of 5%, 10%, 20%, 30%, 40%, 50%, 60%, 70%, 80%, 90% or more of the area wherein necrosis has been identified using biopsy cross-sections. The decrease is measured by comparison to the necrosis as assessed in a same DMD or BMD patient before treatment.

[0098] A detectable increase of the homogeneity of the diameter of a muscle fiber is preferably assessed in a muscle biopsy cross-section, more preferably as described in Hodgetts et al. (2006). The increase is measured by comparison to the homogeneity of the diameter of a muscle fiber in a same DMD or BMD patient before treatment

[0099] Preferably, an oligonucleotide of the invention provides said individual with a functional or a semi-functional dystrophin protein (typically in the case of DMD) and is able to, for at least in part decrease the production of an aberrant dystrophin protein in said individual (typically in the case of BMD).

[0100] Decreasing the production of an aberrant dystrophin mRNA, or aberrant dystrophin protein, preferably means that 90%, 80%, 70%, 60%, 50%, 40%, 30%, 20%, 10%, 5% or less of the initial amount of aberrant dystrophin mRNA, or aberrant dystrophin protein, is still detectable by RT-PCR (mRNA) or immunofluorescence or western blot analysis (protein). An aberrant dystrophin mRNA or protein is also referred to herein as a less functional (compared to a wild type functional dystrophin protein as earlier defined herein) or a non-functional dystrophin mRNA or protein. A non-functional dystrophin protein is preferably a dystrophin protein which is not able to bind actin and/or members of the DGC protein complex. A non-functional dystrophin protein or dystrophin mRNA does typically not have, or does not encode a dystrophin protein with an intact C-terminus of the protein. The detection of a functional or semi-functional dystrophin mRNA or protein may be done as for an aberrant dystrophin mRNA or protein.

[0101] Once a DMD patient is provided with a functional or a semi-functional dystrophin protein, at least part of the cause of DMD is taken away. Hence, it would then be expected that the symptoms of DMD are at least partly alleviated, or that the rate with which the symptoms worsen is decreased, resulting in a slower decline. The enhanced skipping frequency also increases the level of functional or a semi-functional dystrophin protein produced in a muscle cell of a DMD or BMD individual.

[0102] Spinal muscle atrophy (SMA) is a genetic disorder, often fatal, which results from the loss of the SMN protein encoded by the Survival Motor Neuron SMN gene. The SMN genes, SMN1 and SMN2, are located on chromosome 5 and SMA is caused by the loss of SMN1 from both chromosomes. SMN2, while it is almost identical to SMN1, is less effective at providing the SMN protein. SMN1 encodes a ubiquitously expressed 38 kDa SMN protein that is necessary for snRNP assembly, an essential process for cell survival. SMN1 and SMN2 differ by a critical C to T mutation at position 6 of exon 7 (C6U in the transcript of SMN2). C6U does not change the coding sequence, but is sufficient to cause exon 7 skipping in SMN2. This leads to an unstable truncated protein, SMNΔ7. The severity of SMA is affected by the efficiency with which SMN2, of which there are several copies, produces its SMN protein. In SMA patients, SMN2 generally fails to compensate for the loss of SMN1 because of exon 7 skipping, producing the unstable truncated protein, SMNΔ7, which cannot ensure cell survival. At present, available treatment for SMA consists of prevention and management of the secondary effect of chronic motor unit loss. There are no drug therapies available for the treatment or prevention of SMA. Antisense technology for splice switching can be used to provide new therapeutics for SMA treatment. Effective agents can alter splicing of SMN2 pre-mRNAs and are likely to be therapeutically useful. Another molecular basis of SMA can be the point mutation (E134K).

[0103] Preferred AONs enhance the level of exon 7-containing SMN2 mRNA relative to exon 7-deleted SMN2 mRNA in a cell. Preferred AONs are preferably of adequate length and complementarity (more preferably as defined later herein) so that the AONs specifically hybridize to a region within the SMN2 gene, such that the level of exon 7-containing SMN2 mRNA relative to exon-deleted SMN2 mRNA in the cell is enhanced. Preferred AONs comprise or consist of SEQ ID NO: 1400-1579. A more preferred AON comprises or consists of SEQ ID NO: 1490. In the case of SMA, pre-mRNA splicing modulation can be applied to include one or more exons, preferably exon 7, in the SMN2 pre-mRNA in order to increase functional SMN2 levels by increasing expression of exon 7-containing SMN2 mRNA or protein. This has the ultimate goal to be able to delay or even stop progression of the disease.

[0104] In a preferred embodiment, an AON is used for inducing exon 7-inclusion in an SMN pre-mRNA, preferably the SMN2 pre-mRNA, in a cell, in an organ, in a tissue and/or in an individual. Exon-inclusion preferably results in a mature SMN mRNA that contains an otherwise skipped exon 7 and thus can lead to the expression of a more functional protein product. The inclusion of at least one exon, preferably exon 7, is preferably induced by the binding of an AON to specific sequences, preferably intron-internal sequences, comprising splicing regulatory elements, splice sites, and/or intronic branchpoint sequences.

[0105] As defined herein an SMN1 pre-mRNA preferably means a pre-mRNA of an SMN1 gene coding for an SMN protein. As defined herein an SMN2 pre-mRNA preferably means a pre-mRNA of an SMN2 gene coding for an SMN protein. In cases where the pre-mRNA of subjects suffering SMA is discussed, an SMN2 pre-mRNA is sometimes also named an SMN pre-mRNA; this is because in SMA patients no SMN1 gene is present, and thus all SMN pre-mRNA is SMN2 pre-mRNA. An SMN2 gene may also be named an SMN gene in such a case.

[0106] A patient is preferably intended to mean a patient having SMA as defined herein or a patient susceptible to develop SMA due to his or her genetic background. In the case of an SMA patient, an oligonucleotide used will preferably promote inclusion of exon 7 as present in the SMN2 gene of said patient and create a functional SMN protein and not an SMNΔ7 protein: said protein will preferably be a functional or semi-functional SMN as later defined herein. In the case of an SMA patient, an oligonucleotide as used will preferably suppress or reduce the effect of one mutation as present in the SMN2 gene of said patient and create increased levels of an SMN protein which will be more functional than the SMN protein, often the SMNΔ7 protein, which was originally present in said SMA patient. Preferably, the ratio of SMN protein to SMNΔ7 protein shifts in favour of the functional SMN protein. Preferred molar ratios of SMN protein to SMNΔ7 protein that are detected after treatment are 5:4, 5:3, 5:2, 5:1, or 10:1. Most preferably, SMNΔ7 protein can no longer be detected, or only in trace amounts.

[0107] As defined herein, a functional SMN protein is preferably a wild type SMN corresponding to a protein having the amino acid sequence as identified in SEQ ID NO: 1581. Preferably, a functional SMN protein comprises exon 7. This exon 7 is identified in SEQ ID NO: 1584. In other words, a functional or a semi-functional SMN protein is an SMN protein which exhibits at least to some extent an activity of a wild type SMN protein. “At least to some extent” preferably means at least 10%, 20%, 30%, 40%, 50%, 60%, 70%, 80%, 90%, 95% or 100% of a corresponding activity of a wild type functional SMN protein. In this context, preferred activities of a functional SMN protein relate to telomerase regeneration, to transcriptional regulation, and to cellular trafficking, as known to a skilled person. More preferred activities of a functional SMN protein are the formation of functional snRNP assemblies, and the interaction with Sm proteins (Smith proteins).

[0108] Functional SMN binds to the Arg and Gly-rich C-terminal tails of the Sm D1 and D3 proteins (Selenko et al., 2001). In vitro binding assays can be performed to study this interaction, for example through expression of C-terminal tails of Sm D1 and Sm D3 as glutathione-S-transferase (GST) fusion proteins and subsequent pull-down experiments with isolated SMN protein. Less functional SMN will show less or no interaction. Such assays can be performed using total protein extracts. Alternately, exon 7-included SMN can be detected through immunofluorescence analysis of biopsy cross-sections using various antibodies interacting with the region coded by exon 7, or with part of that region, or with folds only present in SMN comprising exon 7. Comparison with non-SMA (control) biopsies can be appropriate, as known to a skilled person.

[0109] In a preferred embodiment, an individual having SMA and being treated by an AON as defined herein will be provided an SMN protein which exhibits at least to some extent an activity of a wild type SMN protein, as typically encoded by the SMN1 gene. More preferably, if said individual is an SMA patient or is suspected to be an SMA patient, a functional SMN protein is an SMN protein with exon 7 included, as typically encoded by the SMN1 gene.

[0110] Alleviating one or more symptom(s) of SMA in an individual using an AON may be assessed by any of the following assays: improvement in weight gain of a subject, improvement in motor activity of a subject, and increased survival time, either of a subject, or of motor neuron cells, and increased production of functional SMN. Each of these parameters are known to the skilled person, and can be assayed routinely. For each of these assays, as soon as a detectable improvement or prolongation of a parameter measured in an assay has been found, it will preferably mean that one or more symptoms of SMA has been alleviated in an individual using an oligonucleotide according to the invention. Detectable improvement or prolongation is preferably a statistically significant improvement or prolongation. Alternatively, the alleviation of one or more symptom(s) of SMA may be assessed by measuring an improvement of a muscle function, integrity, and/or survival. In a preferred method, one or more symptom(s) of an SMA patient is/are alleviated and/or one or more characteristic(s) of one or more muscle cells from an SMA patient is/are improved. Such symptoms or characteristics may be assessed at the cellular, tissue level or on the patient’s self.

[0111] An alleviation of one or more characteristics of a motor neuron cell from a patient may be assessed by any of the following assays on a cell from a patient: reduced calcium uptake, decreased snRNP production, decreased collagen synthesis, altered morphology, altered lipid biosynthesis, decreased oxidative stress, and/or improved muscle function, integrity, and/or survival. These parameters are usually assessed using immunofluorescence and/or histochemical analyses of cross sections of biopsies, such as muscle biopsies.

[0112] A detectable increase in motor neuron survival is preferably assessed in a muscle biopsy, using biopsy cross-sections. A detectable increase of survival may be an increase of 5%, 10%, 20%, 30%, 40%, 50%, 60%, 70%, 80%, 90% or more as compared to untreated control samples, or to known or previous rates of survival. The increase is measured by comparison to the survival as assessed in a same SMA patient before treatment.

[0113] A detectable increase in motor neuron survival can be assessed as known to the skilled person, for example using methods as described in Lunn et al., 2004.

[0114] Preferably, an AON provides said individual with a functional or a semi-functional SMN protein and is able to, for at least in part, decrease the production of an aberrant SMN protein such as SMNΔ7 in said individual.

[0115] Decreasing the production of an aberrant SMN mRNA, or aberrant SMN protein, preferably means that 90%, 80%, 70%, 60%, 50%, 40%, 30%, 20%, 10%, 5% or less of the initial amount of aberrant SMN mRNA, or aberrant SMN protein, is still detectable by RT-PCR (mRNA) or immunofluorescence or western blot analysis (protein). An aberrant SMN mRNA or protein is also referred to herein as a less functional (compared to a wild type functional SMN protein as earlier defined herein) or a non-functional SMN mRNA or protein. A non-functional SMN protein is preferably an SMN protein which is not able to bind Sm proteins and/or which does not promote, or which hampers, snRNP assembly. A non-functional SMN protein or SMN mRNA does typically not have, or does not encode, the amino acid sequence encoded by exon 7. The detection of a functional or semi-functional SMN mRNA or protein may be done as for an aberrant SMN mRNA or protein.

[0116] Once a SMA patient is provided with a functional or a semi-functional SMN protein, at least part of the cause of SMA is taken away. Hence, it would then be expected that the symptoms of SMA are at least partly alleviated, or that the rate with which the symptoms worsen is decreased, resulting in a slower decline. The enhanced inclusion frequency also increases the level of functional or semi-functional SMN protein produced in a cell of an SMA individual.

[0117] Exons and introns contain one or more specific sequences comprising splicing regulatory elements which have shown to be effective targets for antisense oligonucleotides. One embodiment therefore provides an oligonucleotide for providing said individual with a functional or semi-functional dystrophin or SMN protein wherein said oligonucleotide comprises a sequence which is specifically binding and/or blocking these splicing regulatory elements in a dystrophin or SMN2 pre-mRNA exon or intron. In addition, since an exon will only be included into the resulting mRNA when both the splice sites are recognized by the spliceosome complex, splice sites are other targets for an oligonucleotide of the invention. One embodiment therefore provides an oligonucleotide for providing said individual with a functional or semi-functional dystrophin or SMN protein wherein said oligonucleotide comprises a sequence which is specifically binding and/or blocking one of or both the splice sites of an exon of a dystrophin or SMN2 pre-mRNA. Usually a splice site of an exon comprises 1, 2, 3, or more nucleotides present in said exon and 1, 2, 3, or more nucleotides present in an adjacent or neighboring intron. In one embodiment an oligonucleotide is used which is solely binding to an intron region of a dystrophin or SMN2 pre-mRNA. This is however not necessary: it is also possible to use an oligonucleotide which targets, or binds an intron-specific sequence as well as exon-specific sequence. Of course, an oligonucleotide is not necessarily binding to the entire sequence of a dystrophin or SMN2 exon or intron. Oligonucleotides which are specifically binding part of such exon or intron are preferred. An oligonucleotide is used, said oligonucleotide is preferably complementary to, binds to or targets at least part of an exon and/or intron, said part having at least 10, 11, 12, 13, 14, 15, 16, 17, 18, 19, 20, 21, 22, 23, 24, 25, 26, 27, 28, 29, 30, 31, 32, or 33 nucleotides.

[0118] Splicing of a pre-mRNA occurs via two sequential transesterification reactions involving an intronic branch point and a splice site of an adjacent intron. Hence, an oligonucleotide is preferably used for exon skipping, wherein said oligonucleotide comprises a sequence which is binding to such branch point and/or splice site. Preferably said splice site and/or branch point is present in a dystrophin pre-mRNA.

[0119] Since splice sites contain consensus sequences, the use of an oligonucleotide part or a functional equivalent thereof comprising a sequence which is capable of binding to a splice site involves the risk of promiscuous hybridization. Hybridization of said oligonucleotide to other splice sites than the sites of the exon to be skipped could easily interfere with the accuracy of the splicing process. To overcome these and other potential problems related to the use of an oligonucleotide which is binding to a splice site, most preferred embodiment provides an oligonucleotide for providing said individual with a functional or a semi-functional dystrophin or SMN protein, wherein said oligonucleotide or a functional equivalent thereof, binding to a specific part of a dystrophin pre-mRNA exon or SMN2 pre-mRNA exon or intron. Exons contain coding sequences which are typically more specific that the non-coding intron sequences. Preferably, said oligonucleotide binding to a specific part of a dystrophin pre-mRNA exon is capable of specifically blocking, interfering and/or inhibiting a splicing regulatory sequence and/or structure of the anticipated exon(s) in said dystrophin or SMN2 pre-mRNA. Interfering with such splicing regulatory sequence and/or structure has the advantage that such elements are located within the exon. The risk for sequence-related off-target effects is therefore limited. In the case of exon skipping, by providing an oligonucleotide for the interior of the exon to be skipped, it is possible to mask the exon from the splicing apparatus. The failure of the splicing apparatus to recognize the exon to be skipped thus leads to exclusion of the exon from the final mRNA. In the case of exon inclusion, by providing an oligonucleotide for blocking for example an intronic splicing silencer (ISS), increase in exon inclusion is achieved. The hybridization of AONs to the ISS region can displace trans-acting negative repressors and/or can unwind a cis-acting RNA stem-loop that interferes with the binding of U1 small nuclear RNA at the 5′ splice site of the exon to be included These embodiments do not interfere directly with the enzymatic process of the splicing machinery (the joining of the exons). It is thought that this allows the method to be more specific and/or reliable.

[0120] Within the context of the invention, an oligonucleotide of the invention may comprise a functional equivalent of an oligonucleotide. A functional equivalent of an oligonucleotide preferably means an oligonucleotide as defined herein wherein one or more nucleotides have been substituted and wherein an activity of said functional equivalent is retained to at least some extent. Preferably, an activity of said oligonucleotide comprising a functional equivalent of an oligonucleotide is providing a functional or a semi-functional dystrophin or SMN protein. Said activity of said oligonucleotide comprising a functional equivalent of an oligonucleotide is therefore preferably assessed by quantifying the amount of a functional or a semi-functional dystrophin or SMN protein. A functional or semi-functional dystrophin is herein preferably defined as being a dystrophin able to bind actin and members of the DGC (or DAPC) protein complex. The assessment of said activity of said functional equivalent of an oligonucleotide is preferably done by RT-PCR and sequencing (on RNA level; for detection of specific exon skipping (DMD) or inclusion (SMA)), or by immunofluorescence and Western blot analyses (on protein level: for detection of protein restoration). Said activity is preferably retained to at least some extent when it represents at least 50%, or at least 60%, or at least 70% or at least 80% or at least 90% or at least 95% or more of corresponding activity of said oligonucleotide the functional equivalent derives from. Throughout this application, when the word oligonucleotide is used it may be replaced by a functional equivalent thereof as defined herein. Throughout this application, when the word oligonucleotide is used it may be replaced by an antisense oligonucleotide as defined herein unless otherwise indicated.

[0121] Hence, the use of an oligonucleotide according to the invention or a functional equivalent thereof, comprising a 2′-O-methyl monomer, preferably a 2′-O-methyl RNA monomer, or consisting of 2′-O-methyl RNA and optionally comprising phosphorothioate, and comprising at least one BNA scaffold modification with or without a 5-methylpyrimidine (i.e. a 5-methylcytosine and/or a 5-methyluracil) base and being represented by a nucleotide sequence comprising or consisting of a sequence which is complementary to, binds or targets or hybridizes with a dystrophin or SMN2 pre-mRNA exon or intron is assumed to have a positive effect on at least one of the parameters of said oligonucleotide, as has already been defined herein, when compared to their counterparts which do not comprise any BNA scaffold modification with/or without 5-methylcytosine and/or 5-methyluracil as indicated earlier herein, and is therefore assumed to exhibit an improved therapeutic result in a DMD or a BMD or an SMA cell of a patient and/or in a DMD or a BMD or an SMA patient. Such a therapeutic result may be characterized by alleviating one or more symptom(s) of DMD or BMD or SMA. Such a therapeutic result may also or alternately be characterized by:
[0122] reducing the rate of increase or worsening of one or more of said symptoms, and/or
[0123] alleviating one or more characteristics of a muscle cell from a patient and/or
[0124] providing said individual with a functional or semi-functional dystrophin or SMN protein and/or
[0125] decreasing loss of motor neurons in the spinal cord, and/or
[0126] decreasing atrophy of voluntary muscles, and/orat least in part decreasing the production of an aberrant dystrophin protein in said individual.

[0127] Each of these features has already been defined herein.

[0128] Preferably, an oligonucleotide is represented by a nucleotide sequence which comprises or consists of a sequence which is binding to, targeting or being complementary to at least a part of dystrophin or SMN2 pre-mRNA, said oligonucleotide having a length of at least 10 nucleotides. However, the length of said oligonucleotide may be at least 11, 12, 13, 14, 15, 16, 17, 18, 19, 20, 21, 22, 23, 24, 25, 26, 27, 28, 29, 30, 31, 32, or 33 nucleotides.

[0129] One preferred embodiment provides an oligonucleotide for providing said individual with a functional or a semi-functional dystrophin or SMN protein, said oligonucleotide or a functional equivalent thereof, being represented by a sequence which comprises:
[0130] a sequence which binds, targets, hybridizes or is complementary to a region of a dystrophin or SMN2 pre-mRNA exon that is hybridized to another part of a dystrophin or SMN2 pre-mRNA exon (closed structure), and
[0131] a sequence which binds, targets, hybridizes or is complementary to a region of a dystrophin or SMN2 pre-mRNA exon that is not hybridized in said dystrophin or SMN2 pre-mRNA (open structure).

[0132] For this embodiment, reference is made to the WO 2004/083446 patent application. RNA molecules exhibit strong secondary structures, mostly due to base pairing of complementary or partly complementary stretches within the same RNA. It has long since been thought that structures in the RNA play a role in the function of the RNA. Without being bound by theory, it is believed that the secondary structure of the RNA of an exon plays a role in structuring the splicing process. Through its structure, an exon is recognized as a part that needs to be included in the mRNA. In an embodiment, an oligonucleotide is capable of interfering with the structure of the exon and therefore capable of interfering with the splicing apparatus of said exon, masking the exon from the splicing apparatus and thereby inducing the skipping of said exon. It has been found that many oligonucleotides indeed comprise this capacity, some more efficient than others. Without being bound by theory it is thought that the overlap with an open structure improves the invasion efficiency of the oligonucleotide (i.e. increases the efficiency with which the oligonucleotide can enter the structure), whereas the overlap with the closed structure subsequently increases the efficiency of interfering with the secondary structure of the RNA of the exon. It is found that the length of the partial complementarity to both the closed and the open structure is not extremely restricted. We have observed high efficiencies with compounds comprising oligonucleotides with variable lengths of complementarity in either structure. The term (reverse) complementarity is used herein to refer to a stretch of nucleic acids that can hybridise to another stretch of nucleic acids under physiological conditions. An antisense strand is generally said to be complementary to a matching sense strand. In this context, an antisense oligonucleotide is complementary to its target. Hybridization conditions are later defined herein. It is thus not absolutely required that all the bases in the region of complementarity are capable of pairing with bases in the opposing strand. For instance, when designing an antisense oligonucleotide, one may want to incorporate for instance a residue that does not base pair with the base on the complementary strand. Mismatches may to some extent be allowed, if under the circumstances in the cell, the stretch of nucleotides is capable of hybridizing to the complementary part.

[0133] In a preferred embodiment a complementary part of an antisense oligonucleotide (either to said open or to said closed structure) comprises at least 3, and more preferably at least 4 consecutive nucleotides. The complementary regions are preferably designed such that, when combined, they are specific for an exon in a pre-mRNA. Such specificity may be created with various lengths of complementary regions as this depends on the actual sequences in other (pre-)mRNA in the system. The risk that also one or more other pre-mRNA will be able to hybridise to an oligonucleotide decreases with increasing size of said oligonucleotide. It is clear that an antisense oligonucleotide comprising mismatches in the region of complementarity but that retain the capacity to hybridise to the targeted region(s) in the pre-mRNA, can be used in the present invention. However, preferably at least the complementary parts do not comprise such mismatches as these typically have a higher efficiency and a higher specificity than oligonucleotide having such mismatches in one or more complementary regions. It is thought that higher hybridisation strengths, (i.e. increasing number of interactions with the opposing strand) are favourable in increasing the efficiency of the process of interfering with the splicing machinery of the system.

[0134] Preferably, for AONs that are suitable for inducing single-exon skipping, the complementarity is from 90 to 100%. In general this allows for 1 or 2 mismatch(es) in an oligonucleotide of 20 nucleotides or 1 to 4 mismatches in an oligonucleotide of 40 nucleotides. Therefore, we may have 1, 2, 3, 4, 5 mismatches in an oligonucleotide of 10 to 50 nucleotides. Preferably, 0, 1 or 2 mismatches are present in an oligonucleotide of 10 to 50 nucleotides.

[0135] For so-called multiskipping AONs (AONs that are capable of binding to a region of a first exon and to a region of another exon (i.e. a second exon) within the same pre-mRNA, wherein said region of said second exon has at least 50% identity with said region of said first exon) there is preferably at least 80% complementary to said region of said first exon and at least 45% complementary to said region of said second exon. More preferably, said antisense oligonucleotide is at least 85%, 90%, 95% or 100% complementary to said region of said first and at least 50%, 55%, 60%, 65%, 70%, 75%,80%, 85%, 90%, 95% or 100% complementary to said region of said second exon. The complementarity is preferably but not necessarily assessed over the whole length of the oligonucleotide.

[0136] For such so-called multiskipping AONs, a region of a first exon may be at least 13, 14, 15, 16, 17, 18, 19, 20, 21, 22, 23, 24, 25, 26, 27, 28, 29, 30, 31, 32, 33, 34, 35, 36, 37, 38, 39, 40, 41, 42, 43, 44, 45, 46, 47, 48, 49, 50, 51, 52, 53, 54, 55, 56, 57, 58, 59, 60, 61, 62, 63, 64, 65, 66, 67, 68, 69, 70, 71, 72, 73, 74, 75, 76, 77, 78, 79, 80, or up to 90, 100, 110, 120, 130, 140, 150, 160, 170, 180, 190, 200, or more nucleotides. A region of a first exon may also be defined as being at least 1%, 5%, 10%, 20%, 30%, 40%, 50%, 60%, 70%, 80%, 90% or 100% of the length of said exon. A region of a first exon may be called an identity region.

[0137] For such so-called multiskipping AONs, a region of a second exon may be at least 13, 14, 15, 16, 17, 18, 19, 20, 21, 22, 23, 24, 25, 26, 27, 28, 29, 30, 31, 32, 33, 34, 35, 36, 37, 38, 39, 40, 41, 42, 43, 44, 45, 46, 47, 48, 49, 50, 51, 52, 53, 54, 55, 56, 57, 58, 59, 60, 61, 62, 63, 64, 65, 66, 67, 68, 69, 70, 71, 72, 73, 74, 75, 76, 77, 78, 79,80 or up to 90, 100, 110, 120, 130, 140, 150, 160, 170, 180, 190, 200, or more nucleotides. A region of a second exon may be defined as being at least 1%, 5%, 10%, 20%, 30%, 40%, 50%, 60%, 70%, 80%, 90% or 100% of the length of said exon. A region of a second exon may be called an identity region. Preferred additional characteristics of so-called multiskipping AONs are described in WO2014007620.

[0138] The structure (i.e. open and closed structures) is best analyzed in the context of the pre-mRNA wherein the exon resides. Such structure may be analyzed in the actual RNA. However, it is currently possible to predict the secondary structure of an RNA molecule (at lowest energy costs) quite well using structure-modeling programs. Non-limiting examples of a suitable program are RNA structure version 4.5 or RNA mfold version 3.5 (Zuker et al., 2003). A person skilled in the art will be able to predict, with suitable reproducibility, a likely structure of an exon, given a nucleotide sequence. Best predictions are obtained when providing such modeling programs with both said exon and flanking intron sequences. It is typically not necessary to model the structure of the entire pre-mRNA.

[0139] The open and closed structure to which the oligonucleotide of an oligonucleotide is directed, are preferably adjacent to one another. It is thought that in this way the annealing of the oligonucleotide to the open structure induces opening of the closed structure whereupon annealing progresses into this closed structure. Through this action the previously closed structure assumes a different conformation. However, when potential (cryptic) splice acceptor and/or donor sequences are present within the targeted exon, occasionally a new exon inclusion signal is generated defining a different (neo) exon, i.e. with a different 5′ end, a different 3′ end, or both. This type of activity is within the scope of the present invention as the targeted exon is excluded from the mRNA. The presence of a new exon, containing part of the targeted exon, in the mRNA does not alter the fact that the targeted exon, as such, is excluded. The inclusion of a neo-exon can be seen as a side effect which occurs only occasionally. There are two possibilities when exon skipping is used to restore (part of) an open reading frame of dystrophin that is disrupted as a result of a mutation. One is that the neo-exon is functional in the restoration of the reading frame, whereas in the other case the reading frame is not restored. When selecting a compound comprising an oligonucleotide for restoring dystrophin reading frames by means of exon-skipping it is of course clear that under these conditions only those compounds comprising those oligonucleotide are selected that indeed result in exon-skipping that restores the dystrophin open reading frame, with or without a neo-exon.

[0140] Further provided is an oligonucleotide for providing said individual with a functional or a semi-functional dystrophin protein, wherein said oligonucleotide or a functional equivalent thereof is an oligonucleotide as described above, i.e. it comprises a 2′-O-methyl monomer or consists of 2′-O-methyl monomers, preferably 2′-O-methyl RNA monomers, and optionally comprises phosphorothioate, and further comprises a BNA scaffold with or without a 5-methylpyrimidine (i.e. a 5-methylcytosine, and/or a 5-methyluracil) and is represented by a nucleotide sequence comprising a sequence that is complementary to or binds or targets or hybridizes with a binding site for a serine-arginine (SR) protein in RNA of an exon of a dystrophin pre-mRNA. In WO 2006/112705 patent application we have disclosed the presence of a correlation between the effectivity of an exon-internal antisense oligonucleotide in inducing exon skipping and the presence of a (for example by ESEfinder) predicted SR binding site in the target pre-mRNA site of said AON. Therefore, in one embodiment an oligonucleotide is generated comprising determining a (putative) binding site for an SR (Ser-Arg) protein in RNA of a dystrophin exon and producing a corresponding compound comprising oligonucleotide that is complementary to, binds or targets or hybridizes with said RNA and that at least partly overlaps said (putative) binding site. The term “at least partly overlaps” is defined herein as to comprise an overlap of only a single nucleotide of an SR binding site as well as multiple nucleotides of said binding site as well as a complete overlap of said binding site. This embodiment preferably further comprises determining from a secondary structure of said RNA, a region that is hybridized to another part of said RNA (closed structure) and a region that is not hybridized in said structure (open structure), and subsequently generating an oligonucleotide that at least partly overlaps said (putative) binding site and that overlaps at least part of said closed structure and overlaps at least part of said open structure. In this way we increase the chance of obtaining an oligonucleotide that is capable of interfering with the exon inclusion from the pre-mRNA into mRNA. It is possible that a first selected SR-binding region does not have the requested open-closed structure in which case another (second) SR protein binding site is selected which is then subsequently tested for the presence of an open-closed structure. This process is continued until a sequence is identified which contains an SR protein binding site as well as a(n) (partly overlapping) open-closed structure. This sequence is then used to design an oligonucleotide which is complementary to said sequence.

[0141] Such a method for generating an antisense oligonucleotide is also performed by reversing the described order, i.e. first generating an oligonucleotide comprising determining, from a secondary structure of RNA from a dystrophin exon, a region that assumes a structure that is hybridised to another part of said RNA (closed structure) and a region that is not hybridised in said structure (open structure), and subsequently generating an oligonucleotide, of which at least a part of said oligonucleotide is complementary to said closed structure and of which at least another part of said oligonucleotide is complementary to said open structure. This is then followed by determining whether an SR protein binding site at least overlaps with said open/closed structure. In this way the method of WO 2004/083446 is improved. In yet another embodiment the selections are performed simultaneously.

[0142] Without wishing to be bound by any theory it is currently thought that use of an oligonucleotide directed to or targeting an SR protein binding site results in (at least partly) impairing the binding of an SR protein to the binding site of an SR protein which results in disrupted or impaired splicing.

[0143] Preferably, an open/closed structure and an SR protein binding site partly overlap and even more preferred an open/closed structure completely overlaps an SR protein binding site or an SR protein binding site completely overlaps an open/closed structure. This allows for an improved disruption of exon inclusion.

[0144] Besides consensus splice site and branchpoint intronic sequences, many (if not all) exons contain splicing regulatory sequences such as but not limited to exonic splicing enhancer (ESE) sequences to facilitate the recognition of genuine splice sites by the spliceosome (Cartegni et al., 2002; and Cartegni et al., 2003). A subgroup of splicing factors, called the SR proteins, can bind to these ESEs and recruit other splicing factors, such as U1 and U2AF to (weakly defined) splice sites. The binding sites of the four most abundant SR proteins (SF2/ASF, SC35, SRp40 and SRp55) have been analyzed in detail and these results are implemented in ESEfinder, a web source that predicts potential binding sites for these SR proteins (Cartegni et al., 2002; and Cartegni et al., 2003). In embodiments where the AON is for exon skipping, there is a correlation between the effectiveness of an AON and the presence/absence of an SF2/ASF, SC35 and SRp40 binding site in the site targeted by said AON. In a preferred embodiment, the invention thus provides an oligonucleotide as described above, which is complementary to or targets or binds a binding site for a SR protein. Preferably, said SR protein is SF2/ASF or SC35 or SRp40. In embodiments where the AON is for exon inclusion, there is a correlation between the effectiveness of an AON and the presence of a U1 small nuclear RNA binding site or a heterogeneous nuclear ribonucleoprotein (hnRNP) binding site or a small nuclear ribonucleoprotein (snRNP) in the site targeted by said AON. In a preferred embodiment, the invention provides an oligonucleotide as described above, which is complementary to or targets or binds a binding site for a snRNA, such as U1 small nuclear RNA, a snRNP, or a hnRNP.

[0145] In one embodiment a DMD patient is provided with a functional or a semi-functional dystrophin protein by using an oligonucleotide as described above, or a functional equivalent thereof, i.e. an oligonucleotide comprising a 2′-O-methyl monomer, preferably a 2′-O-methyl RNA monomer, or consisting of 2′-O-methyl RNA and comprising at least one BNA scaffold with or without a 5-methylpyrimidine (i.e. a 5-methylcytosine, and/or a 5-methyluracil) base and being capable of specifically binding or targeting a regulatory RNA sequence which is required for the correct splicing of a dystrophin exon in a transcript. Several cis-acting RNA sequences are required for the correct splicing of exons in a transcript. In particular, elements such as an exonic splicing enhancer (ESE), an exon recognition sequence (ERS), and/or an exonic splicing silencer (ESS) and/or an intronic splicing silencer (ISS) are identified to regulate specific and efficient splicing of constitutive and alternative exons. Using a sequence-specific antisense oligonucleotide (AON) that binds to, targets or is complementary to the elements, their regulatory function is disturbed so that the exon is skipped or included, as shown for DMD or SMA. Hence, in one preferred embodiment, an oligonucleotide or a functional equivalent thereof is used which is complementary to, binds or targets an exonic splicing enhancer (ESE), an exon recognition sequence (ERS), and/or an exonic splicing silencer (ESS) and/or an intronic splicing silencer (ISS).

[0146] In a preferred embodiment, an oligonucleotide of the invention that is suitable for inducing the skipping of a single exon comprises or consists of a sequence that is complementary to or binds or targets or hybridizes with at least a part of dystrophin pre-mRNA exons 44, 45, 46, 47, 48, 49, 50, 51, 52, 53, 54, or 55, said part having at least 10 nucleotides. However, said part may also have at least 11, 12, 13, 14, 15, 16, 17, 18, 19, 20, 21, 22, 23, 24, 25, 26, 27, 28, 29, 30, 31, 32, or, 33 nucleotides. For the dystrophin exons identified above, we provide a stretch of nucleotides (SEQ ID NO: 2 to 7) from said exon to which an oligonucleotide preferably binds or is complementary to or targets or hybridizes with.

[0147] In a preferred embodiment, an oligonucleotide of the invention that is suitable for so-called multiskipping as defined earlier herein induces the skipping of the following dystrophin exons: exons 8 to 19, exons 9 to 22, exons 9 to 30, exons 10 to 18, exons 10 to 30, exons 10 to 42, exons 10 to 47, exons 10 to 57, exons 10 to 60, exons 11 to 23, exons 13 to 30, exons 23 to 42, exons 34 to 53, exons 40 to 53, exons 44 to 56, exons 45 to 51, exons 45 to 53, exons 45 to 55, exons 45 to 60 or exons 56 to 60. Preferably, such a so-called multiskipping oligonucleotide according to the invention comprises or consists of a sequence that is capable of binding to, targeting, hybridizing and/or is reverse-complementary to a region of a first exon of the dystrophin pre-mRNA such that the reverse-complementary part is at least 30% of the length of said oligonucleotide of the invention, more preferably at least 40%, even more preferably at least 50%, even more preferably at least 60%, even more preferably at least 70%, even more preferably at least 80%, even more preferably at least 90% or even more preferably at least 95%, or even more preferably 98% and most preferably up to 100%. In this context, a first exon is preferably exon 8, 9, 10, 11, 13, 23, 34, 40, 44, 45, or 56 of dystrophin pre-mRNA as defined herein. Said oligonucleotide may comprise additional flanking sequences. In a more preferred embodiment, the length of said reverse-complementary part of said oligonucleotide is at least 10, 11, 12, 13, 14, 15, 16, 17, 18, 19, 20, 21, 22, 23, 24, 25, 26, 27, 28, 29, 30, 31, 32, 33, 34, 35, 36, 37, 38, 39, or 40 nucleotides. Several types of flanking sequences may be used. Preferably, flanking sequences are used to modify the binding of a protein to said oligonucleotide, or to modify a thermodynamic property of said oligonucleotide, more preferably to modify target RNA binding affinity. In another preferred embodiment, additional flanking sequences are reverse-complementary to sequences of the dystrophin pre-mRNA which are not present in said exon.

[0148] A preferred oligonucleotide comprises:
[0149] i) Ia) at least one 2′-substituted monomer, preferably an RNA monomer or a 2′-O-substituted RNA monomer, and optionally a phosphorothioate backbone linkage, or Ib) only 2′-substituted monomers, preferably RNA monomers or 2′-O-substituted RNA monomers, linked by phosphorothioate backbone linkages and/or by phosphodiester linkages,
[0150] ii) a 5-methylcytosine and/or a 5-methyluracil base and
[0151] iii) at least one monomer comprising a bicyclic nucleic acid (BNA) scaffold modification,
and binds or is complementary to or targets or hybridizes with a continuous stretch of at least 10 and up to 33 nucleotides within at least one of the following exon nucleotide sequences selected from SEQ ID NO: 2 to 7, more preferably from:

5′-GCGAUUUGACAGAUCUGUUGAGAAAUGGCGGCGUUUUCAUUAUGAUA
UAAAGAUAUUUAAUCAGUGGCUAACAGAAGCUGAACAGUUUCUCAGAAAG
ACACAAAUUCCUGAGAAUUGGGAACAUGCUAAAUACAAAUGGUAUCUUAA
G-3′ (SEQ IDNO: 2)

for skipping or at least skipping of exon 44;

5′-GAACUCCAGGAUGGCAUUGGGCAGCGGCAAACUGUUGUCAGAACAUU
GAAUGCAACUGGGGAAGAAAUAAUUCAGCAAUCCUCAAAAACAGAUGCCA
GUAUUCUACAGGAAAAAUUGGGAAGCCUGAAUCUGCGGUGGCAGGAGGUC
UGCAAACAGCUGUCAGACAGAAAAAAGAG-3′ (SEQ ID NO: 3)

for skipping or at least skipping of exon 45;

5′-CUCCUACUCAGACUGUUACUCUGGUGACACAACCUGUGGUUACUAAG
GAAACUGCCAUCUCCAAACUAGAAAUGCCAUCUUCCUUGAUGUUGGAGGU
ACCUGCUCUGGCAGAUUUCAACCGGGCUUGGACAGAACUUACCGACUGGC
UUUCUCUGCUUGAUCAAGUUAUAAAAUCACAGAGGGUGAUGGUGGGUGAC
CUUGAGGAUAUCAACGAGAUGAUCAUCAAGCAGAAG-3′ (SEQ ID NO
: 4)

for skipping or at least skipping of exon 51;

5′-GCAACAAUGCAGGAUUUGGAACAGAGGCGUCCCCAGUUGGAAGAACU
CAUUACCGCUGCCCAAAAUUUGAAAAACAAGACCAGCAAUCAAGAGGCUA
GAACAAUCAUUACGGAUCGAA-3′ (SEQ ID NO: 5)

for skipping or at least skipping of exon 52;

5′-UUGAAAGAAUUCAGAAUCAGUGGGAUGAAGUACAAGAACACCUUCAG
AACCGGAGGCAACAGUUGAAUGAAAUGUUAAAGGAUUCAACACAAUGGCU
GGAAGCUAAGGAAGAAGCUGAGCAGGUCUUAGGACAGGCCAGAGCCAAGC
UUGAGUCAUGGAAGGAGGGUCCCUAUACAGUAGAUGCAAUCCAAAAGAAA
AUCACAGAAACCAAG-3′ (SEQ ID NO: 6)

for skipping or at least skipping of exon 53;

5′-GGUGAGUGAGCGAGAGGCUGCUUUGGAAGAAACUCAUAGAUUACUGC
AACAGUUCCCCCUGGACCUGGAAAAGUUUCUUGCCUGGCUUACAGAAGCU
GAAACAACUGCCAAUGUCCUACAGGAUGCUACCCGUAAGGAAAGGCUCCU
AGAAGACUCCAAGGGAGUAAAAGAGCUGAUGAAACAAUGGCAA-3′ (SE
Q ID NO: 7)

for skipping or at least skipping of exon 55.

[0152] Another preferred oligonucleotide comprises:
[0153] i) Ia) at least one 2′-substituted monomer, preferably an RNA monomer or a 2′-O-substituted RNA monomer, and optionally a phosphorothioate backbone linkage, or Ib) only 2′-substituted monomers, preferably RNA monomers or 2′-O-substituted RNA monomers, linked by phosphorothioate backbone linkages and/or by phosphodiester linkages,
[0154] ii) a 5-methylcytosine and/or a 5-methyluracil base and
[0155] iii) at least one monomer comprising a bicyclic nucleic acid (BNA) scaffold modification,
and comprises a continuous stretch of at least 10 and up to 33 nucleotides of at least one of the following nucleotide sequences selected from SEQ ID NO: 6065 to 6070, more preferably from:

5′-CUUAAGAUACCAUUUGUAUUUAGCAUGUUCCCAAUUCUCAGGAAUUU
GUGUCUUUCUGAGAAACUGUUCAGCUUCUGUUAGCCACUGAUUAAAUAUC
UUUAUAUCAUAAUGAAAACGCCGCCAUUUCUCAACAGAUCUGUCAAAUCG
C-3′ (SEQ IDNO: 6065)

for skipping at least exon 44,

5′-CUCUUUUUUCUGUCUGACAGCUGUUUGCAGACCUCCUGCCACCGCAG
AUUCAGGCUUCCCAAUUUUUCCUGUAGAAUACUGGCAUCUGUUUUUGAGG
AUUGCUGAAUUAUUUCUUCCCCAGUUGCAUUCAAUGUUCUGACAACAGUU
UGCCGCUGCCCAAUGCCAUCCUGGAGUUC-3′ (SEQ ID NO: 6066)

for skipping at least exon 45,

5′-CUUCUGCUUGAUGAUCAUCUCGUUGAUAUCCUCAAGGUCACCCACCA
UCACCCUCUGUGAUUUUAUAACUUGAUCAAGCAGAGAAAGCCAGUCGGUA
AGUUCUGUCCAAGCCCGGUUGAAAUCUGCCAGAGCAGGUACCUCCAACAU
CAAGGAAGAUGGCAUUUCUAGUUUGGAGAUGGCAGUUUCCUUAGUAACCA
CAGGUUGUGUCACCAGAGUAACAGUCUGAGUAGGAG-3′ (SEQ ID NO
: 6067),

for skipping at least exon 51

5′-UUCGAUCCGUAAUGAUUGUUCUAGCCUCUUGAUUGCUGGUCUUGUUU
UUCAAAUUUUGGGCAGCGGUAAUGAGUUCUUCCAACUGGGGACGCCUCUG
UUCCAAAUCCUGCAUUGUUGC-3′ (SEQ ID NO: 6068)

for skipping at least exon 52,

5′-CUUGGUUUCUGUGAUUUUCUUUUGGAUUGCAUCUACUGUAUAGGGAC
CCUCCUUCCAUGACUCAAGCUUGGCUCUGGCCUGUCCUAAGACCUGCUCA
GCUUCUUCCUUAGCUUCCAGCCAUUGUGUUGAAUCCUUUAACAUUUCAUU
CAACUGUUGCCUCCGGUUCUGAAGGUGUUCUUGUACUUCAUCCCACUGAU
UCUGAAUUCUUUCAA-3′ (SEQ ID NO: 6069)

for skipping at least exon 53,

5′-UUGCCAUUGUUUCAUCAGCUCUUUUACUCCCUUGGAGUCUUCUAGGA
GCCUUUCCUUACGGGUAGCAUCCUGUAGGACAUUGGCAGUUGUUUCAGCU
UCUGUAAGCCAGGCAAGAAACUUUUCCAGGUCCAGGGGGAACUGUUGCAG
UAAUCUAUGAGUUUCUUCCAAAGCAGCCUCUCGCUCACUCACC-3′ (SE
Q ID NO: 6070)

for skipping at least exon 55.

[0156] In preferred embodiments, the oligonucleotide according to the invention comprises or consists of a nucleotide sequence represented by SEQ ID NOs: 8-271 or SEQ ID NOs: 1608-2099 or SEQ ID NOs: 3000-3184. These oligonucleotides are preferably for skipping dystrophin pre-mRNA exon 44.

[0157] In preferred embodiments, the oligonucleotide according to the invention comprises or consists of a nucleotide sequence represented by SEQ ID NOs: 272-451 or SEQ ID NOs: 3185-4527. These oligonucleotides are preferably for skipping dystrophin pre-mRNA exon 45.

[0158] In preferred embodiments, the oligonucleotide according to the invention comprises or consists of a nucleotide sequence represented by SEQ ID NOs: 452-613 or SEQ ID NOs: 4528-4572. In more preferred embodiments, the oligonucleotide according to the invention comprises or consists of a nucleotide sequence represented by SEQ ID NOs: 455, 459, 4528, 4531, 4532, 4533, 4535, 4542, 4548, or 4568. These oligonucleotides are preferably for skipping dystrophin pre-mRNA exon 51.

[0159] In preferred embodiments, the oligonucleotide according to the invention comprises or consists of a nucleotide sequence represented by SEQ ID NOs: 842-1159 or SEQ ID NOs: 4573-6048. These oligonucleotides are preferably for skipping dystrophin pre-mRNA exon 53.

[0160] In preferred embodiments, the oligonucleotide according to the invention comprises or consists of a nucleotide sequence represented by SEQ ID NO: 614-841. These oligonucleotides are preferably for skipping dystrophin pre-mRNA exon 52.

[0161] In preferred embodiments, the oligonucleotide according to the invention comprises or consists of a nucleotide sequence represented by SEQ ID NO: 1160-1399. These oligonucleotides are preferably for skipping dystrophin pre-mRNA exon 55.

[0162] SEQ ID NOs: 6065-6070 represent reverse complementary sequences to SEQ ID NOs: 2-7. In a more preferred embodiment, the oligonucleotide according to the invention has a length from 10 to 33 nucleotides and comprises:
[0163] i) only 2′-substituted monomers, preferably RNA monomers or 2′-O-substituted RNA monomers, linked by phosphorothioate backbone linkages and/or by phosphodiester linkages,
[0164] ii) a 5-methylcytosine base, and
[0165] iii) at least one monomer comprising a bicyclic nucleic acid (BNA) scaffold modification,
and comprises a continuous stretch of at least 10 and up to 33 nucleotides of at least one of the nucleotide sequences selected from SEQ ID NO: 6065 to 6070, preferably SEQ ID NO: 6067.

[0166] In an even more preferred embodiment, the oligonucleotide according to the invention has a length from 10 to 33 nucleotides and comprises:
[0167] i) only 2′-substituted monomers, preferably 2′-O-substituted RNA monomers, linked by phosphorothioate backbone linkages,
[0168] ii) a 5-methylcytosine base, and
[0169] iii) at least one monomer comprising a bicyclic nucleic acid (BNA) scaffold modification,
and comprises a continuous stretch of at least 10 and up to 33 nucleotides of at least one of the nucleotide sequences selected from SEQ ID NO: 6065 to 6070, preferably SEQ ID NO: 6067. In more preferred embodiments, such an oligonucleotide has at least two monomers comprising a BNA scaffold modification.

[0170] In these embodiments, it is preferred that said continuous stretch is of at least 16 to 26 nucleotides, or from 16 to 25 nucleotides in length. In another embodiment, said continuous stretch is from 16 to 24 nucleotides in length. In another embodiment, said continuous stretch is from 16 to 22 nucleotides in length. In another embodiment, said continuous stretch is 16, 18, 20, or 22 nucleotides in length. In another embodiment, said continuous stretch is 21, 22, 24, or 25 nucleotides in length. In another embodiment, said continuous stretch is 18, 22, 24, or 25 nucleotides in length. The oligonucleotide of the invention preferably consists of said continuous stretch.

[0171] More preferred oligonucleotides comprise at least one 2′-substituted monomer and optionally a phosphorothioate backbone linkage, or only 2′-substituted monomers linked by phosphorothioate backbone linkages and/or by phosphodiester linkages, comprise a 5-methylcytosine and/or a 5-methyluracil base and comprise at least one monomer comprising a bicyclic nucleic acid (BNA) scaffold modification, and are represented by a nucleotide sequence comprising or consisting of SEQ ID NO: 8-1580 or SEQ ID NO: 1592-1607, or by a nucleotide sequence comprising or consisting of a fragment of SEQ ID NO: 8 -1580 or SEQ ID NO: 1592-1607. More preferred oligonucleotides comprise at least one 2′-substituted monomer and optionally a phosphorothioate backbone linkage, or only 2′-substituted monomers linked by phosphorothioate backbone linkages and/or by phosphodiester linkages, comprise a 5-methylcytosine and/or a 5-methyluracil base and comprise at least one monomer comprising a bicyclic nucleic acid (BNA) scaffold modification, and are represented by a nucleotide sequence comprising or consisting of SEQ ID NO: 8-1580 or SEQ ID NO: 1592-2099 or SEQ ID NO: 3000-6048, or by a nucleotide sequence comprising or consisting of a fragment of SEQ ID NO: 8 -1580 or SEQ ID NO: 1592-2099 or SEQ ID NO: 3000-6048. Such oligonucleotides preferably have a length of 16-30 nucleotides, more preferably of 16-24 nucleotides, most preferably of 19, 22, or 22 nucleotides. More preferred oligonucleotides are as described above, and are represented by a nucleotide sequence comprising or consisting of SEQ ID NO: 9-13, 15-19, 21-25, 27-31, 33-37, 39-43, 45-49,51-55, 57-61, 63-67, 69-73, 75-79, 81-85, 87-91, 93-97, 99-103,105-109, 111-115, 117-121, 123-127, 129-133, 135-139, 141-145, 147-151, 153-157, 159-163, 165-169, 171-175, 177-181, 183-187, 189-193, 195-199, 201-205, 207-211, 213-217, 219-223, 225-229, 231-235, 237-241, 243-247, 249-253, 255-259, 261-265, 267-271, 273-277, 279-283, 285-289, 291-295, 297-301, 303-307, 309-313, 315-319, 321-325, 327-331, 333-337, 339-343, 345-349, 351-355, 357-361, 363-367, 369-373, 375-379, 381-385, 387-391, 393-397, 399-403, 405-409, 411-415, 417-421, 423-427, 429-433, 435-439, 441-445, 447-451, 453-457, 459-463, 465-469, 471-475, 477-481, 483-487, 489-493, 495-499, 501-505, 507-511, 513-517, 519-523, 525-529, 531-535, 537-541, 543-547, 549-553, 555-559, 561-565, 567-571, 573-577, 579-583, 585-589, 591-595, 597-601, 603-607, 609-613, 615-619, 621-625, 627-631, 633-637, 639-643, 645-649, 651-655, 657-661, 663-667, 669-673, 675-679, 681-685, 687-691, 693-697, 699-703, 705-709, 711-715, 717-721, 723-727, 729-733, 735-739, 741-745, 747-751, 753-757, 759-763, 765-769, 771-775, 777-781, 783-787, 789-793, 795-799, 801-805, 807-811, 813-817, 819-823, 825-829, 831-835, 837-841, 843-847, 849-853, 855-859, 861-865, 867-871, 873-877, 879-883, 885-889, 891-895, 897-901, 903-907, 909-913, 915-919, 921-925, 927-931, 933-937, 939-943, 945-949, 951-955, 957-961, 963-967, 969-973, 975-979, 981-985, 987-991, 993-997, 999-1003, 1005-1009, 1011-1015, 1017-1021, 1023-1027, 1029-1033, 1035-1039, 1041-1045, 1047-1051, 1053-1057, 1059-1063, 1065-1069, 1071-1075, 1077-1081, 1083-1087, 1089-1093, 1095-1099, 1101-1105, 1107-1111, 1113-1117, 1119-1123, 1125-1129, 1131-1135, 1137-1141, 1143-1147, 1149-1153, 1155-1159, 1161-1165, 1167-1171, 1173-1177, 1179-1183, 1185-1189, 1191-1195, 1197-1201, 1203-1207, 1209-1213, 1215-1219, 1221-1225, 1227-1231, 1233-1237, 1239-1243, 1245-1249, 1251-1255, 1257-1261, 1263-1267, 1269-1273, 1275-1279, 1281-1285, 1287-1291, 1293-1297, 1299-1303, 1305-1309, 1311-1315, 1317-1321, 1323-1327, 1329-1333, 1335-1339, 1341-1345, 1347-1351, 1353-1357, 1359-1363, 1365-1369, 1371-1375, 1377-1381, 1383-1387, 1389-1393, 1395-1399, 1401-1405, 1407-1411, 1413-1417, 1419-1423, 1425-1429, 1431-1435, 1437-1441, 1443-1447, 1449-1453, 1455-1459, 1461-1465, 1467-1471, 1473-1477, 1479-1483, 1485-1489, 1491-1495, 1497-1501, 1503-1507, 1509-1513, 1515-1519, 1521-1525, 1527-1531, 1533-1537, 1539-1543, 1545-1549, 1551-1555, 1557-1561, 1563-1567, 1569-1573, 1575-1579, 1592-2099, or 3000-6048 or by a nucleotide sequence comprising or consisting of a fragment of SEQ ID NO: 9-13, 15-19, 21-25, 27-31, 33-37, 39-43, 45-49, 51-55, 57-61, 63-67, 69-73, 75-79, 81-85, 87-91, 93-97, 99-103, 105-109, 111-115, 117-121, 123-127, 129-133, 135-139, 141-145, 147-151, 153-157, 159-163, 165-169, 171-175, 177-181, 183-187, 189-193, 195-199, 201-205, 207-211, 213-217, 219-223, 225-229, 231-235, 237-241, 243-247, 249-253, 255-259, 261-265, 267-271, 273-277, 279-283, 285-289, 291-295, 297-301, 303-307, 309-313, 315-319, 321-325, 327-331, 333-337, 339-343, 345-349, 351-355, 357-361, 363-367, 369-373, 375-379, 381-385, 387-391, 393-397, 399-403, 405-409, 411-415, 417-421, 423-427, 429-433, 435-439, 441-445, 447-451, 453-457, 459-463, 465-469, 471-475, 477-481, 483-487, 489-493, 495-499, 501-505, 507-511, 513-517, 519-523, 525-529, 531-535, 537-541, 543-547, 549-553, 555-559, 561-565, 567-571, 573-577, 579-583, 585-589, 591-595, 597-601, 603-607, 609-613, 615-619, 621-625, 627-631, 633-637, 639-643, 645-649, 651-655, 657-661, 663-667, 669-673, 675-679, 681-685, 687-691, 693-697, 699-703, 705-709, 711-715, 717-721, 723-727, 729-733, 735-739, 741-745, 747-751, 753-757, 759-763, 765-769, 771-775, 777-781, 783-787, 789-793, 795-799, 801-805, 807-811, 813-817, 819-823, 825-829, 831-835, 837-841, 843-847, 849-853, 855-859, 861-865, 867-871, 873-877, 879-883, 885-889, 891-895, 897-901, 903-907, 909-913, 915-919, 921-925, 927-931, 933-937, 939-943, 945-949, 951-955, 957-961, 963-967, 969-973, 975-979, 981-985, 987-991, 993-997, 999-1003, 1005-1009, 1011-1015, 1017-1021, 1023-1027, 1029-1033, 1035-1039, 1041-1045, 1047-1051, 1053-1057, 1059-1063, 1065-1069, 1071-1075, 1077-1081, 1083-1087, 1089-1093, 1095-1099, 1101-1105, 1107-1111, 1113-1117, 1119-1123, 1125-1129, 1131-1135, 1137-1141, 1143-1147, 1149-1153, 1155-1159, 1161-1165, 1167-1171, 1173-1177, 1179-1183, 1185-1189, 1191-1195, 1197-1201, 1203-1207, 1209-1213, 1215-1219, 1221-1225, 1227-1231, 1233-1237, 1239-1243, 1245-1249, 1251-1255, 1257-1261, 1263-1267, 1269-1273, 1275-1279, 1281-1285, 1287-1291, 1293-1297, 1299-1303, 1305-1309, 1311-1315, 1317-1321, 1323-1327, 1329-1333, 1335-1339, 1341-1345, 1347-1351, 1353-1357, 1359-1363, 1365-1369, 1371-1375, 1377-1381, 1383-1387, 1389-1393, 1395-1399, 1401-1405, 1407-1411, 1413-1417, 1419-1423, 1425-1429, 1431-1435, 1437-1441, 1443-1447, 1449-1453, 1455-1459, 1461-1465, 1467-1471, 1473-1477, 1479-1483, 1485-1489, 1491-1495, 1497-1501, 1503-1507, 1509-1513, 1515-1519, 1521-1525, 1527-1531, 1533-1537, 1539-1543, 1545-1549, 1551-1555, 1557-1561, 1563-1567, 1569-1573, 1575-1579, 1592-2099, or 3000-6048. Within the context of the invention, a fragment of SEQ ID NO: 8-1580 or SEQ ID NO: 1592-2099 or SEQ ID NO: 3000-6048 preferably means a nucleotide sequence comprising or consisting of at least 10 contiguous nucleotides from said SEQ ID NO.

[0172] More preferred oligonucleotides comprise at least one 2′-substituted monomer, preferably an RNA monomer, and optionally a phosphorothioate backbone linkage, or only 2′-substituted monomers linked by phosphorothioate backbone linkages and/or by phosphodiester linkages, comprise a 5-methylcytosine and/or a 5-methyluracil base and comprise at least one monomer comprising a bicyclic nucleic acid (BNA) scaffold modification, and are represented by a nucleotide sequence comprising or consisting of SEQ ID NO: 8-1580 or SEQ ID NO: 1592-2099 or SEQ ID NO: 3000-6048, or by a nucleotide sequence comprising or consisting of fragment of SEQ ID NO: 8-1580 or SEQ ID NO: 1592-2099 or SEQ ID NO: 3000-6048, and have a length of 10, 11, 12, 13, 14, 15, 16, 17, 18, 19, 20, 21, 22, 23, 24, 25, 26, 27, 28, 29, 30, 31, 32 or 33 nucleotides.

[0173] Preferred sequences include SEQ ID NO: 452-613 and SEQ ID NO: 1592-1605 and SEQ ID NO: 1607, more preferably SEQ ID NO: 453-457, 459-463, 465-469, 471-475, 477-481, 483-487, 489-493, 495-499, 501-505, 507-511, 513-517, 519-523, 525-529, 531-535, 537-541, 543-547, 549-553, 555-559, 561-565, 567-571, 573-577, 579-583, 585-589, 591-595, 597-601, 603-607, 609-613, 1592-1605, and 1607, and even more preferably SEQ ID NO: 453, 455, 456, 459, 461, 462, 465, 467, 468, 471, 473, 474, 483, 486, 1592, 1593, 1594, 1595, 1596, 1597, 1598, 1599, 1600, 1601, 1602, 1603, 1604, 1605, or 1607. The most preferred sequences are SEQ ID NO: 455, 459, 4528, 4531, 4532, 4533, 4535, 4542, 4548, and 4568.

[0174] In a preferred embodiment, an oligonucleotide is represented by a nucleotide sequence comprising or consisting of SEQ ID NO: 8-271 or SEQ ID NO:1608-2099 or SEQ ID NO: 3000-3184 and is for skipping exon 44 of the pre-mRNA of dystrophin, and comprises one or more of the following:
[0175] at least one 2′-substituted monomer
[0176] at least one phosphorothioate backbone linkage;
[0177] only 2′-substituted monomers;
[0178] only phosphorothioate backbone linkages;
[0179] only 2′-substituted monomers linked by phosphorothioate backbone linkages;
[0180] a 5-methylcytosine and/or a 5-methyluracil base;
[0181] only 5-methylcytosine bases instead of cytosine bases;
[0182] at least one monomer comprising a bicyclic nucleic acid (BNA) scaffold modification.

[0183] Preferably, said oligonucleotide comprises only 2′-substituted monomers, only phosphorothioate backbone linkages, and at least one monomer comprising a BNA scaffold modification More preferably, said oligonucleotide is represented by a nucleotide sequence comprising or consisting of SEQ ID NO: 9-13, 15-19, 21-25, 27-31, 33-37, 39-43, 45-49,51-55, 57-61, 63-67, 69-73, 75-79, 81-85, 87-91, 93-97, 99-103, 105-109, 111-115, 117-121, 123-127, 129-133, 135-139, 141-145, 147-151, 153-157, 159-163, 165-169, 171-175, 177-181, 183-187, 189-193, 195-199, 201-205, 207-211, 213-217, 219-223, 225-229, 231-235, 237-241, 243-247, 249-253, 255-259, 261-265, or 267-271. Preferably, said oligonucleotide has a length of 10 to 33 nucleotides, most preferably of 16 to 22 nucleotides.

[0184] In a preferred embodiment, an oligonucleotide is represented by a nucleotide sequence comprising or consisting of SEQ ID NO: 272-451 or SEQ ID NO:3185-4527 and is for skipping exon 45 of the pre-mRNA of dystrophin, and comprises one or more of the following:
[0185] at least one 2′-substituted monomer
[0186] at least one phosphorothioate backbone linkage;
[0187] only 2′-substituted monomers;
[0188] only phosphorothioate backbone linkages;
[0189] only 2′-substituted monomers linked by phosphorothioate backbone linkages;
[0190] a 5-methylcytosine and/or a 5-methyluracil base;
[0191] only 5-methylcytosine bases instead of cytosine bases;
[0192] at least one monomer comprising a bicyclic nucleic acid (BNA) scaffold modification.

[0193] Preferably, said oligonucleotide comprises only 2′-substituted monomers, only phosphorothioate backbone linkages, and at least one monomer comprising a BNA scaffold modification. More preferably, said oligonucleotide is represented by a nucleotide sequence comprising or consisting of SEQ ID NO: 273-277, 279-283, 285-289, 291-295, 297-301, 303-307, 309-313, 315-319, 321-325, 327-331, 333-337, 339-343, 345-349, 351-355, 357-361, 363-367, 369-373, 375-379, 381-385, 387-391, 393-397, 399-403, 405-409, 411-415, 417-421, 423-427, 429-433, 435-439, 441-445, or 447-451. Preferably, said oligonucleotide has a length of 10 to 33 nucleotides, most preferably of 16 to 22 nucleotides.

[0194] In a preferred embodiment, an oligonucleotide is represented by a nucleotide sequence comprising or consisting of SEQ ID NO: 452-613 or SEQ ID NO 1592-1605 or SEQ ID NO: 4528-4572 and is for skipping exon 51 of the pre-mRNA of dystrophin, and comprises one or more of the following:
[0195] at least one 2′-substituted monomer
[0196] at least one phosphorothioate backbone linkage;
[0197] only 2′-substituted monomers;
[0198] only phosphorothioate backbone linkages;
[0199] only 2′-substituted monomers linked by phosphorothioate backbone linkages;
[0200] a 5-methylcytosine and/or a 5-methyluracil base;
[0201] only 5-methylcytosine bases instead of cytosine bases;
[0202] at least one monomer comprising a bicyclic nucleic acid (BNA) scaffold modification.

[0203] Preferably, said oligonucleotide comprises only 2′-substituted monomers, only phosphorothioate backbone linkages, and at least one monomer comprising a BNA scaffold modification. More preferably, said oligonucleotide is represented by a nucleotide sequence comprising or consisting of SEQ ID NO: 453-457, 459-463, 465-469, 471-475, 477-481, 483-487, 489-493, 495-499, 501-505, 507-511, 513-517, 519-523, 525-529, 531-535, 537-541, 543-547, 549-553, 555-559, 561-565, 567-571, 573-577, 579-583, 585-589, 591-595, 597-601, 603-607, 609-613, 1592-1605, or 1607, even more preferably SEQ ID NO: 453, 455, 456, 459, 461, 462, 465, 467, 468, 471, 473, 474, 483, 486, 1592, 1593, 1594, 1595, 1596, 1597, 1598, 1599, 1600, 1601, 1602, 1603, 1604, 1605, or 1607 most preferably SEQ ID NO: 1592, 1593, 1594, 1595, 1596, 1597, 1598, 1599, 1600, 1601, 1602, 1603, 1604, 1605, or 1607, even more preferably SEQ ID NO: 455, 459, 4528, 4531, 4532, 4533, 4535, 4542, 4548, and 4568. Preferably, said oligonucleotide has a length of 10 to 33 nucleotides, most preferably of 16 to 22 nucleotides.

[0204] Accordingly, in a preferred embodiment, an oligonucleotide according to the invention is represented by a nucleotide sequence comprising or consisting of SEQ ID NO: 1592 (TCAAGGAAGAUGGCAUUUCU) and is for skipping exon 51 of the pre-mRNA of dystrophin, comprises a BNA scaffold modification in the 5′-terminal monomer and in no other monomers, comprises 5-methylcytosine instead of cytosine, comprises only phosphorothioate linkages, and further comprises only 2′-O-methyl RNA monomers.

[0205] Accordingly, in a preferred embodiment, an oligonucleotide according to the invention is represented by a nucleotide sequence comprising or consisting of

SEQ ID NO:1593 (TCAAGGAAGAUGGCAUUUCT)

and is for skipping exon 51 of the pre-mRNA of dystrophin, comprises a BNA scaffold modification in the 5′-terminal monomer and in the 3′-terminal monomer and in no other monomers, comprises 5-methylcytosine instead of cytosine, comprises only phosphorothioate linkages, and further comprises only 2′-O-methyl RNA monomers.

[0206] Accordingly, in a preferred embodiment, an oligonucleotide according to the invention is represented by a nucleotide sequence comprising or consisting of

SEQ ID NO:1594 (TCAAGGAAGAUGGCAUUUCU)

and is for skipping exon 51 of the pre-mRNA ofdystrophin, comprises a BNA scaffold modification in the 5′-terminal monomer and in its neighbouring monomer and in no other monomers, comprises 5-methylcytosine instead of cytosine, comprises only phosphorothioate linkages, and further comprises only 2′-O-methyl RNA monomers.

[0207] Accordingly, in a preferred embodiment, an oligonucleotide according to the invention is represented by nucleotide sequence comprising or consisting of

SEQ ID NO:1595 (TCAAGGAAGAUGGCAUUUCUAG)

and is for skipping exon 51 of the pre-mRNA of dystrophin, comprises a BNA scaffold modification in the 5′-terminal monomer and in no other monomers, comprises 5-methylcytosine instead of cytosine, comprises only phosphorothioate linkages, and further comprises only 2′-O-methyl RNA monomers.

[0208] Accordingly, in a preferred embodiment, an oligonucleotide according to the invention is represented by a nucleotide sequence comprising or consisting of

SEQ ID NO:1596 (TCAAGGAAGAUGGCAUUUCUAG)

and is for skipping exon 51 of the pre-mRNA of dystrophin, comprises a BNA scaffold modification in the 5′-terminal monomer and in the 3′-terminal monomer and in no other monomers, comprises 5-methylcytosine instead of cytosine, comprises only phosphorothioate linkages, and further comprises only 2′-O-methyl RNA monomers.

[0209] Accordingly, in a preferred embodiment, an oligonucleotide according to the invention is represented by a nucleotide sequence comprising or consisting of

SEQ ID NO:1597 (TCAAGGAAGAUGGCAUUUCUAG)

and is for skipping exon 51 of the pre-mRNA of dystrophin, comprises a BNA scaffold modification in the 5′-terminal monomer and in its neighbouring monomer and in no other monomers, comprises 5-methylcytosine instead of cytosine, comprises only phosphorothioate linkages, and further comprises only 2′-O-methyl RNA monomers.

[0210] Accordingly, in a preferred embodiment, an oligonucleotide according to the invention is represented by a nucleotide sequence comprising or consisting of

SEQ ID NO:1598 (AAGGAAGAUGGCAUUUCU)

and is for skipping exon 51 of the pre-mRNA of dystrophin, comprises a BNA scaffold modification in the 5′-terminal monomer and in no other monomers, comprises 5-methylcytosine instead of cytosine, comprises only phosphorothioate linkages, and further comprises only 2′-O-methyl RNA monomers.

[0211] Accordingly, in a preferred embodiment, an oligonucleotide according to the invention is represented by a nucleotide sequence comprising or consisting of

SEQ ID NO:1599 (AAGGAAGAUGGCAUUUCT)

and is for skipping exon 51 of the pre-mRNA of dystrophin, comprises a BNA scaffold modification in the 5′-terminal monomer and in the 3′-terminal monomer and in no other monomers, comprises 5-methylcytosine instead of cytosine, comprises only phosphorothioate linkages, and further comprises only 2′-O-methyl RNA monomers.

[0212] Accordingly, in a preferred embodiment, an oligonucleotide according to the invention is represented by a nucleotide sequence comprising or consisting of

SEQ ID NO:1600 (AAGGAAGAUGGCAUUUCU)

and is for skipping exon 51 of the pre-mRNA of dystrophin, comprises a BNA scaffold modification in the 5′-terminal monomer and in its neighbouring monomer and in no other monomers, comprises 5-methylcytosine instead of cytosine, comprises only phosphorothioate linkages, and further comprises only 2′-O-methyl RNA monomers.

[0213] Accordingly, in a preferred embodiment, an oligonucleotide according to the invention is represented by a nucleotide sequence comprising or consisting of

SEQ ID NO:1601 (GGAAGAUGGCAUUUCU)

and is for skipping exon 51 of the pre-mRNA of dystrophin, comprises a BNA scaffold modification in the 5′-terminal monomer and in no other monomers, comprises 5-methylcytosine instead of cytosine, comprises only phosphorothioate linkages, and further comprises only 2′-O-methyl RNA monomers.

[0214] Accordingly, in a preferred embodiment, an oligonucleotide according to the invention is represented by a nucleotide sequence comprising or consisting of

SEQ ID NO:1602 (GGAAGAUGGCAUUUCT)

and is for skipping exon 51 of the pre-mRNA of dystrophin, comprises a BNA scaffold modification in the 5′-terminal monomer and in the 3′-terminal monomer and in no other monomers, comprises 5-methylcytosine instead of cytosine, comprises only phosphorothioate linkages, and further comprises only 2′-O-methyl RNA monomers.

[0215] Accordingly, in a preferred embodiment, an oligonucleotide according to the invention is represented by a nucleotide sequence comprising or consisting of

SEQ ID NO:1603 (GGAAGAUGGCAUUUCU)

and is for skipping exon 51 of the pre-mRNA of dystrophin, comprises a BNA scaffold modification in the 5′-terminal monomer and in its neighbouring monomer and in no other monomers, comprises 5-methylcytosine instead of cytosine, comprises only phosphorothioate linkages, and further comprises only 2′-O-methyl RNA monomers.

[0216] Accordingly, in a preferred embodiment, an oligonucleotide according to the invention is represented by a nucleotide sequence comprising or consisting of

SEQ ID NO:1604 (TCAAGGAAGAUGGCAU)

and is for skipping exon 51 of the pre-mRNA of dystrophin, comprises a BNA scaffold modification in the 5′-terminal monomer and in no other monomers, comprises 5-methylcytosine instead of cytosine, comprises only phosphorothioate linkages, and further comprises only 2′-O-methyl RNA monomers.

[0217] Accordingly, in a preferred embodiment, an oligonucleotide according to the invention is represented by a nucleotide sequence comprising or consisting of

SEQ ID NO:1605 (TCAAGGAAGAUGGCAU)

and is for skipping exon 51 of the pre-mRNA of dystrophin, comprises a BNA scaffold modification in the 5′-terminal monomer and in its neighbouring monomer and in no other monomers, comprises 5-methylcytosine instead of cytosine, comprises only phosphorothioate linkages, and further comprises only 2′-O-methyl RNA monomers.

[0218] Accordingly, in a preferred embodiment, an oligonucleotide according to the invention is represented by a nucleotide sequence comprising or consisting of

SEQ ID NO:1607 (CUCCAACAUCAAGGAAGAUGGCAUUUCUAG)

and is for skipping exon 51 of the pre-mRNA of dystrophin, comprises no BNA scaffold modification in any monomers, comprises cytosine, comprises only phosphorothioate linkages, and further comprises only 2′-O-methyl RNA monomers.

[0219] Accordingly, in a preferred embodiment, an oligonucleotide according to the invention ▫is ▫represented by a nucleotide sequence comprising or consisting of

SEQ ID NO:1607 (CUCCAACAUCAAGGAAGAUGGCAUUUCUAG)

and is for skipping exon 51 of the pre-mRNA of dystrophin, comprises at least one BNA scaffold modification in any monomer, preferably only in either the 5′terminal monomer, the 3′-terminal monomer, both the 5′-terminal and in the 3′-terminal monomer, the two most 5′-terminal monomers, or the two most 3′-terminal monomers, comprises cytosine, comprises only phosphorothioate linkages, and further comprises only 2′-O-methyl RNA monomers.

[0220] Accordingly, in a preferred embodiment, an oligonucleotide according to the invention is represented by a nucleotide sequence comprising or consisting of

SEQ ID NO:455 (TCAAGGAAGAUGGCAUUUCT)

and is for skipping exon 51 of the pre-mRNA of dystrophin, comprises a BNA scaffold modification in the 5′-terminal monomer and in the 3′-terminal monomer and in no other monomers, comprises 5-methylcytosine instead of cytosine, comprises only phosphorothioate linkages, and further comprises only 2′-O-methyl RNA monomers.

[0221] Accordingly, in a preferred embodiment, an oligonucleotide according to the invention is represented by a nucleotide sequence comprising or consisting of

SEQ ID NO:459 (TCAAGGAAGAUGGCAUUUCUAG)

and is for skipping exon 51 of the pre-mRNA of dystrophin, comprises a BNA scaffold modification in the 5′-terminal monomer and in no other monomers, comprises 5-methylcytosine instead of cytosine, comprises only phosphorothioate linkages, and further comprises only 2′-O-methyl RNA monomers.

[0222] Accordingly, in a preferred embodiment, an oligonucleotide according to the invention is represented by a nucleotide sequence comprising or consisting of

SEQ ID NO:4528 (TCAAGGAAGAUGGCAUUUCUAG)

and is for skipping exon 51 of the pre-mRNA of dystrophin, comprises a BNA scaffold modification in the 5′-terminal monomer, its neighbouring monomer, and its 3′-terminal monomer, and in no other monomers, comprises 5-methylcytosine instead of cytosine, comprises only phosphorothioate linkages, and further comprises only 2′-O-methyl RNA monomers.

[0223] Accordingly, in a preferred embodiment, an oligonucleotide according to the invention is represented by a nucleotide sequence comprising or consisting of

SEQ ID NO:4531 (TCAAGGAAGAUGGCAUUUCUAG)

and is for skipping exon 51 of the pre-mRNA of dystrophin, comprises a BNA scaffold modification in the 5′-terminal monomer, its neighbouring monomer, in the 13^{th}monomer from the 5′-terminus, and in its 3′-terminal monomer, and in no other monomers, comprises 5-methylcytosine instead of cytosine, comprises only phosphorothioate linkages, and further comprises only 2′-O-methyl RNA monomers.

[0224] Accordingly, in a preferred embodiment, an oligonucleotide according to the invention is represented by a nucleotide sequence comprising or consisting of

SEQ ID NO:4532 (TCAAGGAAGAUGGCAUUUCUAG)

and is for skipping exon 51 of the pre-mRNA of dystrophin, comprises a BNA scaffold modification in the 5′-terminal monomer, its neighbouring monomer, in the 9^{th}monomer from the 5′-terminus, and in its 3′-terminal monomer, and in no other monomers, comprises 5-methylcytosine instead of cytosine, comprises only phosphorothioate linkages, and further comprises only 2′-O-methyl RNA monomers.

[0225] Accordingly, in a preferred embodiment, an oligonucleotide according to the invention is represented by a nucleotide sequence comprising or consisting of

SEQ ID NO:4533 (TCAAGGAAGAUGGCAUUUCUAG)

and is for skipping exon 51 of the pre-mRN of dystrophin, comprises a BNA scaffold modification in the 5′-terminal monomer, its neighbouring monomer, in the 9^{th}monomer from the 5′-terminus, in the 13^{th}monomer from the 5′-terminus, and in its 3′-terminal monomer, and in no other monomers, comprises 5-methylcytosine instead of cytosine, comprises only phosphorothioate linkages, and further comprises only 2′-O-methyl RNA monomers.

[0226] Accordingly, in a preferred embodiment, an oligonucleotide according to the invention is represented by a nucleotide sequence comprising or consisting of

SEQ ID NO:4535 (TCAAGGAAGAUGGCAUUUCT)

and is for skipping exon 51 of the pre-mRNA of dystrophin, comprises a BNA scaffold modification in the 5′-terminal monomer, in its neighbouring monomer, and in its 3′-terminal monomer, and in no other monomers, comprises 5-methylcytosine instead of cytosine, comprises only phosphorothioate linkages, and further comprises only 2′-O-methyl RNA monomers.

[0227] Accordingly, in a preferred embodiment, an oligonucleotide according to the invention is represented by a nucleotide sequence comprising or consisting of

SEQ ID NO:4542 (TCAAGGAAGAUGGCAUUUCT)

and is for skipping exon 51 of the pre-mRNA of dystrophin, comprises a BNA scaffold modification in the 5′-terminal monomer, in its 13^{th} monomer from the 5′-terminus, and in its 3′-terminal monomer, and in no other monomers, comprises 5-methylcytosine instead of cytosine, comprises only phosphorothioate linkages, and further comprises only 2′-O-methyl RNA monomers.

[0228] Accordingly, in a preferred embodiment, an oligonucleotide according to the invention is represented by a nucleotide sequence comprising or consisting of

SEQ ID NO:4548 (CAAGGAAGAUGGCAUUUCT)

and is for skipping exon 51 of the pre-mRNA of dystrophin, comprises a BNA scaffold modification in the 5′-terminal monomer, in its neighbouring monomer, in its 8^{th}monomer from the 5′-terminus, in its 12^{th}monomer from the 5′-terminus, and in its 3′-terminal monomer, and in no other monomers, comprises 5-methylcytosine instead of cytosine, comprises only phosphorothioate linkages, and further comprises only 2′-O-methyl RNA monomers.

[0229] Accordingly, in a preferred embodiment, an oligonucleotide according to the invention is represented by a nucleotide sequence comprising or consisting of

SEQ ID NO:4568 (GGUAAGUUCUGUCCAAGC)

and is for skipping exon 51 of the pre-mRNA of dystrophin, comprises a BNA scaffold modification in the 5′-terminal monomer, in its neighbouring monomer, in its 6^{th}monomer from the 5′-terminus, and in its 3′-terminal monomer, and in no other monomers, comprises 5-methylcytosine instead of cytosine, comprises only phosphorothioate linkages, and further comprises only 2′-O-methyl RNA monomers.

[0230] In a preferred embodiment, an oligonucleotide is represented by a nucleotide sequence comprising or consisting of SEQ ID NO: 614-841 and is for skipping exon 52 of the pre-mRNA of dystrophin, and comprises one or more of the following:
[0231] at least one 2′-substituted monomer
[0232] at least one phosphorothioate backbone linkage;
[0233] only 2′-substituted monomers;
[0234] only phosphorothioate backbone linkages;
[0235] only 2′-substituted monomers linked by phosphorothioate backbone linkages;
[0236] a 5-methylcytosine and/or a 5-methyluracil base;
[0237] only 5-methylcytosine bases instead of cytosine bases;
[0238] at least one monomer comprising a bicyclic nucleic acid (BNA) scaffold modification.

[0239] Preferably, said oligonucleotide comprises only 2′-substituted monomers, only phosphorothioate backbone linkages, and at least one monomer comprising a BNA scaffold modification. More preferably, said oligonucleotide is represented by a nucleotide sequence comprising or consisting of SEQ ID NO: 615-619, 621-625, 627-631, 633-637, 639-643, 645-649, 651-655, 657-661, 663-667, 669-673, 675-679, 681-685, 687-691, 693-697, 699-703, 705-709, 711-715, 717-721, 723-727, 729-733, 735-739, 741-745, 747-751, 753-757, 759-763, 765-769, 771-775, 777-781, 783-787, 789-793, 795-799, 801-805, 807-811, 813-817, 819-823, 825-829, 831-835, or 837-841. Preferably, said oligonucleotide has a length of 10 to 33 nucleotides, most preferably of 16 to 22 nucleotides.

[0240] In a preferred embodiment, an oligonucleotide is represented by a nucleotide sequence comprising or consisting of SEQ ID NO: 842-1159 or SEQ ID NO:4573-6048 and is for skipping exon 53 of the pre-mRNA of dystrophin, and comprises one or more of the following:
[0241] at least one 2′-substituted monomer
[0242] at least one phosphorothioate backbone linkage;
[0243] only 2′-substituted monomers;
[0244] only phosphorothioate backbone linkages;
[0245] only 2′-substituted monomers linked by phosphorothioate backbone linkages;
[0246] a 5-methylcytosine and/or a 5-methyluracil base;
[0247] only 5-methylcytosine bases instead of cytosine bases;
[0248] at least one monomer comprising a bicyclic nucleic acid (BNA) scaffold modification.

[0249] Preferably, said oligonucleotide comprises only 2′-substituted monomers, only phosphorothioate backbone linkages, and at least one monomer comprising a BNA scaffold modification. More preferably, said oligonucleotide is represented by a nucleotide sequence comprising or consisting of SEQ ID NO: 843-847, 849-853, 855-859, 861-865, 867-871, 873-877, 879-883, 885-889, 891-895, 897-901, 903-907, 909-913, 915-919, 921-925, 927-931, 933-937, 939-943, 945-949, 951-955, 957-961, 963-967, 969-973, 975-979, 981-985, 987-991, 993-997, 999-1003, 1005-1009, 1011-1015, 1017-1021, 1023-1027, 1029-1033, 1035-1039, 1041-1045, 1047-1051, 1053-1057, 1059-1063, 1065-1069, 1071-1075, 1077-1081, 1083-1087, 1089-1093, 1095-1099, 1101-1105, 1107-1111, 1113-1117, 1119-1123, 1125-1129, 1131-1135, 1137-1141, 1143-1147, 1149-1153, or 1155-1159. Preferably, said oligonucleotide has a length of 10 to 33 nucleotides, most preferably of 16 to 22 nucleotides.

[0250] In a preferred embodiment, an oligonucleotide is represented by a nucleotide sequence comprising or consisting of SEQ ID NO: 1160-1399 and is for skipping exon 55 of the pre-mRNA of dystrophin, and comprises one or more of the following:
[0251] at least one 2′-substituted monomer
[0252] at least one phosphorothioate backbone linkage;
[0253] only 2′-substituted monomers;
[0254] only phosphorothioate backbone linkages;
[0255] only 2′-substituted monomers linked by phosphorothioate backbone linkages;
[0256] a 5-methylcytosine and/or a 5-methyluracil base;
[0257] only 5-methylcytosine bases instead of cytosine bases;
[0258] at least one monomer comprising a bicyclic nucleic acid (BNA) scaffold modification.

[0259] Preferably, said oligonucleotide comprises only 2′-substituted monomers, only phosphorothioate backbone linkages, and at least one monomer comprising a BNA scaffold modification. More preferably, said oligonucleotide is represented by a nucleotide sequence comprising or consisting of SEQ ID NO: 1161-1165, 1167-1171, 1173-1177, 1179-1183, 1185-1189, 1191-1195, 1197-1201, 1203-1207, 1209-1213, 1215-1219, 1221-1225, 1227-1231, 1233-1237, 1239-1243, 1245-1249, 1251-1255, 1257-1261, 1263-1267, 1269-1273, 1275-1279, 1281-1285, 1287-1291, 1293-1297, 1299-1303, 1305-1309, 1311-1315, 1317-1321, 1323-1327, 1329-1333, 1335-1339, 1341-1345, 1347-1351, 1353-1357, 1359-1363, 1365-1369, 1371-1375, 1377-1381, 1383-1387, 1389-1393, or 1395-1399. Preferably, said oligonucleotide has a length of 10 to 33 nucleotides, most preferably of 16 to 22 nucleotides.

[0260] In a preferred embodiment, an oligonucleotide is represented by a nucleotide sequence comprising or consisting of SEQ ID NO: 1400-1579 and is for including exon 7 of the pre-mRNA of SMN2, and comprises one or more of the following:
[0261] at least one 2′-substituted monomer
[0262] at least one phosphorothioate backbone linkage;
[0263] only 2′-substituted monomers;
[0264] only phosphorothioate backbone linkages;
[0265] only 2′-substituted monomers linked by phosphorothioate backbone linkages;
[0266] a 5-methylcytosine and/or a 5-methyluracil base;
[0267] only 5-methylcytosine bases instead of cytosine bases;
[0268] at least one monomer comprising a bicyclic nucleic acid (BNA) scaffold modification.

[0269] Preferably, said oligonucleotide comprises only 2′-substituted monomers, only phosphorothioate backbone linkages, and at least one monomer comprising a BNA scaffold modification. Most preferably, said oligonucleotide is represented by a nucleotide sequence comprising or consisting of SEQ ID NO: 1606, wherein it comprises no BNA scaffold modification, or comprising or consisting of SEQ ID NO: 1490, wherein it comprises BNA scaffold modifications in any monomer, preferably only in either the 5′terminal monomer, the 3′-terminal monomer, both the 5′-terminal and in the 3′-terminal monomer, the two most 5′-terminal monomers, or the two most 3′-terminal monomers. Preferably, said oligonucleotide has a length of 10 to 33 nucleotides, most preferably of 16 to 22 nucleotides.

[0270] In a preferred embodiment, an oligonucleotide is represented by a nucleotide sequence comprising or consisting of SEQ ID NO: 1400-1441 and is for targeting intron 6 of the pre-mRNA of SMN2, and comprises one or more of the following:
[0271] at least one 2′-substituted monomer
[0272] at least one phosphorothioate backbone linkage;
[0273] only 2′-substituted monomers;
[0274] only phosphorothioate backbone linkages;
[0275] only 2′-substituted monomers linked by phosphorothioate backbone linkages;
[0276] a 5-methylcytosine and/or a 5-methyluracil base;
[0277] only 5-methylcytosine bases instead of cytosine bases;
[0278] at least one monomer comprising a bicyclic nucleic acid (BNA) scaffold modification.

[0279] Preferably, said oligonucleotide comprises only 2′-substituted monomers, only phosphorothioate backbone linkages, and at least one monomer comprising a BNA scaffold modification. More preferably, said oligonucleotide is represented by a nucleotide sequence comprising or consisting of SEQ ID NO: 1401-1405, 1407-1411, 1413-1417, 1419-1423, 1425-1429, 1431-1435, 1437-1441. Preferably, said oligonucleotide has a length of 10 to 33 nucleotides, most preferably of 16 to 22 nucleotides.

[0280] In a preferred embodiment, an oligonucleotide is represented by a nucleotide sequence comprising or consisting of SEQ ID NO: 1442-1579 and is for targeting intron 7 of the pre-mRNA of SMN2, and comprises one or more of the following:
[0281] at least one 2′-substituted monomer
[0282] at least one phosphorothioate backbone linkage;
[0283] only 2′-substituted monomers;
[0284] only phosphorothioate backbone linkages;
[0285] only 2′-substituted monomers linked by phosphorothioate backbone linkages;
[0286] a 5-methylcytosine and/or a 5-methyluracil base;
[0287] only 5-methylcytosine bases instead of cytosine bases;
[0288] at least one monomer comprising a bicyclic nucleic acid (BNA) scaffold modification.

[0289] Preferably, said oligonucleotide comprises only 2′-substituted monomers, only phosphorothioate backbone linkages, and at least one monomer comprising a BNA scaffold modification. More preferably, said oligonucleotide is represented by a nucleotide sequence comprising or consisting of SEQ ID NO: 1443-1447, 1449-1453, 1455-1459, 1461-1465, 1467-1471, 1473-1477, 1479-1483, 1485-1489, 1491-1495, 1497-1501, 1503-1507, 1509-1513, 1515-1519, 1521-1525, 1527-1531, 1533-1537, 1539-1543, 1545-1549, 1551-1555, 1557-1561, 1563-1567, 1569-1573, 1575-1579. Most preferably, said oligonucleotide is represented by a nucleotide sequence comprising or consisting of SEQ ID NO: 1490, wherein it comprises BNA scaffold modifications in any monomer, preferably only in either the 5′terminal monomer, the 3′-terminal monomer, both the 5′-terminal and in the 3′-terminal monomer, the two most 5′-terminal monomers, or the two most 3′-terminal monomers. Preferably, said oligonucleotide has a length of 10 to 33 nucleotides, more preferably of 16 to 22 nucleotides, most preferably 18 monomers.

[0290] In a preferred embodiment, an oligonucleotide according to the invention is represented by a nucleotide sequence comprising or consisting of

SEQ ID NO: 1606(UCACUUUCAUAAUGCUGG)

and is for targeting intron 7 of the pre-mRNA of SMN2, comprises no BNA scaffold modification in any monomers, comprises 5-methylcytosine instead of cytosine, comprises only phosphorothioate linkages, and further comprises only 2′-O-methyl RNA monomers.

[0291] In preferred embodiments the oligonucleotide according to the invention is one wherein said oligonucleotide has an improved parameter by comparison to a corresponding oligonucleotide that does not comprise a bicyclic nucleic acid (BNA) scaffold modification. We discovered that the presence of a BNA with 5-methylcytosine or 5-methyluracil in an oligonucleotide of the invention has a positive effect on at least one of the parameters of said oligonucleotides. In this context, parameters may include: binding affinity and/or kinetics, exon skipping activity, biostability, (intra-tissue) distribution, cellular uptake and/or trafficking, and/or immunogenicity of said oligonucleotide, as explained below.

[0292] Binding affinity and kinetics depend on the thermodynamic properties of the oligonucleotide. These are at least in part determined by the melting temperature of said oligonucleotide (Tm; calculated with e.g. the oligonucleotide properties calculator (accessible via the internet at for example www.unc.edu/~cail/biotool/oligo/index.html or at for example eu.idtdna.com/analyzer/Applications/OligoAnalyzer/) for single stranded RNA using the basic Tm and the nearest neighbor model), and/or the free energy of the oligonucleotide-target exon complex (using RNA structure version 4.5 or RNA mfold version 3.5). If a Tm is increased, the exon skipping activity typically increases, but when a Tm is too high, the oligonucleotide is expected to become less sequence-specific. An acceptable Tm and free energy depend on the sequence of the oligonucleotide. Therefore, it is difficult to give preferred ranges for each of these parameters.

[0293] Exon skipping activity is preferably measured by analysing total RNA isolated from oligonucleotide-treated muscle cell cultures or muscle tissue by reverse transcriptase quantitative or digital droplet polymerase chain reaction (RT-qPCR or RT-ddPCR) using DMD gene-specific primers flanking the targeted exon as described (Aartsma-Rus et al., 2003, Spitali et al., 2013). The ratio of shorter transcript fragments, representing transcripts in which the targeted exon is skipped, to the total of transcript products is assessed (calculated as percentage of exon skipping induced by an oligonucleotide). Shorter fragments may also be sequenced to determine the correctness and specificity of the targeted exon skipping.

[0294] In certain embodiments, RNA modulation activity may be an increase or decrease in an amount of a nucleic acid or protein. In certain embodiments, such activity may be a change in the ratio of splice variants of a nucleic acid or protein. Detection and/or measuring of antisense activity may be direct or indirect. In certain embodiments, antisense activity is assessed by observing a phenotypic change in a cell or animal.

[0295] As used herein and explained above, “modulation” can refer to a perturbation of amount or quality of a function or activity when compared to the function or activity prior to modulation. For example, modulation includes the change, either an increase (stimulation or induction) or a decrease (inhibition or reduction) in gene expression. As a further example, modulation of expression can include perturbing splice site selection of pre-mRNA processing, resulting in a change in the amount of a particular splice-variant present compared to conditions that were not perturbed. As a further example, modulation includes perturbing translation of a protein.

[0296] Biodistribution and biostability are preferably at least in part determined by a validated hybridization ligation assay adapted from Yu et al., 2002. In an embodiment, plasma or homogenized tissue samples are incubated with a specific capture oligonucleotide probe. After separation, a DIG-labeled oligonucleotide is ligated to the complex and detection followed using an anti-DIG antibody-linked peroxidase. Non-compartmental pharmacokinetic analysis is performed using WINNONLIN software package (model 200, version 5.2, Pharsight, Mountainview, CA). Levels of oligonucleotide (µg) per mL plasma or mg tissue are monitored over time to assess area under the curve (AUC), peak concentration (Cₘₐₓ), time to peak concentration (Tₘₐₓ), terminal half life and absorption lag time (t_{lag}). Such a preferred assay has been disclosed in the experimental part.

[0297] Accordingly, a preferred oligonucleotide of the invention has an improved parameter, such as an acceptable or a decreased immunogenicity and/or a better biodistribution and/or acceptable or improved RNA binding kinetics and/or thermodynamic properties by comparison to a corresponding oligonucleotide that differs only from the oligonucleotide of the invention through omission of BNA scaffold modifications, i.e. by comparison to an oligonucleotide of the same sequence, also comprising 2′-O-methyl substituted monomers, 5′-methylcytosine and/or 5′-methyluracil, optionally phosphorothioate, yet without a BNA modified scaffold. Each of these parameters could be assessed using assays known to the skilled person or preferably as disclosed herein.

### Further Chemical Modifications of the Oligonucleotide

[0298] Below other chemistries and modifications of the oligonucleotide of the invention are defined. These additional chemistries and modifications may be present in combination with the chemistry already defined for said oligonucleotide, i.e. the presence of at least 1 BNA scaffold modification with or without a 5-methylcytosine and/or a 5-methyluracil, and/or the oligonucleotide comprising or consisting of a 2′-O-methyl monomer with optional phosphorothioate backbone linkages.

[0299] A preferred oligonucleotide of the invention comprises or consists of an RNA molecule or a modified RNA molecule. In a preferred embodiment, an oligonucleotide is single stranded. The skilled person will understand that it is however possible that a single stranded oligonucleotide may form an internal double stranded structure. However, this oligonucleotide is still named a single stranded oligonucleotide in the context of this invention.

[0300] In addition to the modifications described above, the oligonucleotide of the invention may comprise further modifications such as different types of nucleic acid monomers or nucleotides as described below. Different types of nucleic acid monomers may be used to generate an oligonucleotide of the invention. Said oligonucleotide may have at least one backbone, and/or scaffold modification and/or at least one base modification compared to an RNA-based oligonucleotide.

[0301] A base modification can include a modified version of the natural purine and pyrimidine bases (e.g. adenine, uracil, guanine, cytosine, and thymine), such as hypoxanthine, pseudouracil, pseudocytosine, 1-methylpseudouracil, orotic acid, agmatidine, lysidine, 2-thiopyrimidine (e.g. 2-thiouracil, 2-thiothymine), G-clamp and its derivatives, 5-substituted pyrimidine (e.g. 5-halouracil, 5-halomethyluracil, 5-trifluoromethyluracil, 5-propynyluracil, 5-propynylcytosine, 5-aminomethyluracil, 5-hydroxymethyluracil, 5-aminomethylcytosine, 5-hydroxymethylcytosine, Super T, or as described in e.g. Kumar et al. J. Org. Chem. 2014, 79, 5047; Leszczynska et al. Org. Biol. Chem. 2014, 12, 1052), pyrazolo[1,5-a]-1,3,5-triazine C-nucleoside (as in e.g. Lefoix et al. J. Org. Chem. 2014, 79, 3221), 7-deazaguanine, 7-deazaadenine, 7-aza-2,6-diaminopurine, 8-aza-7-deazaguanine, 8-aza-7-deazaadenine, 8-aza-7-deaza-2,6-diaminopurine, Super G, Super A, boronated cytosine (as in e.g. Niziol et al. Bioorg. Med. Chem. 2014, 22, 3906), pseudoisocytidine, C(Pyc) (as in e.g. Yamada et al. Org. Biomol. Chem. 2014, 12, 2255) and N4-ethylcytosine, or derivatives thereof; N²-cyclopentylguanine (cPent-G), N²-cyclopentyl-2-aminopurine (cPent-AP), and N²-propyl-2-aminopurine (Pr-AP), carbohydrate-modified uracil (as in e.g. Kaura et al. Org. Lett. 2014, 16, 3308), amino acid modified uracil (as in e.g. Guenther et al. Chem. Commun. 2014, 50, 9007); or derivatives thereof; and degenerate or universal bases, like 2,6-difluorotoluene or absent bases like abasic sites (e.g. 1-deoxyribose, 1,2-dideoxyribose, 1-deoxy-2-O-methylribose; or pyrrolidine derivatives in which the ring oxygen has been replaced with nitrogen (azaribose)). Examples of derivatives of Super A, Super G and Super T can be found in U.S. Pat. 6,683,173 (Epoch Biosciences), which is incorporated here entirely by reference. cPent-G, cPent-AP and Pr-AP were shown to reduce immunostimulatory effects when incorporated in siRNA (Peacock H. et al. J. Am. Chem. Soc. 2011, 133, 9200). Examples of modified bases are described in e.g. WO2014/093924 (ModeRNA).

[0302] Depending on its length an oligonucleotide of the invention may comprise 1, 2, 3, 4, 5, 6, 7, 8, 9, 10, 11, 12, 13, 14, 15, 16, 17, 18, 19, 20, 21, 22, 23, 24, 25, 26, 27, 28, 29, 30, 31, 32, 33, or 34 base modifications. It is also encompassed by the invention to introduce more than one distinct base modification in said oligonucleotide.

[0303] In addition to BNA scaffold modifications already described, a scaffold modification can include a modified version of the ribosyl moiety, such as 2′-O-modified RNA such as 2′-O-alkyl or 2′-O-(substituted)alkyl e.g. 2′-O-methyl, 2′-O-(2-cyanoethyl), 2′-O-(2-methoxy)ethyl (2′-MOE), 2′-O-(2-thiomethyl)ethyl, 2′-O-butyryl, 2′-O-propargyl, 2′-O-acetalester (such as e.g. Biscans et al. Bioorg. Med. Chem. 2015, 23, 5360), 2′-O-allyl, 2′-O-(25-methoxypropyl), 2′-O-(N-(aminoethyl)carbamoyl)methyl) (2′-AECM), 2′-O-(2-carboxyethyl) and carbamoyl derivatives (Yamada et al. Org. Biomol. Chem. 2014, 12, 6457), 2′-O-(2-amino)propyl, 2′-O-(2-(dimethylamino)propyl), 2′-O-(2-amino)ethyl, 2′-O-(2-(dimethylamino)ethyl); 2′-deoxy (DNA); 2′-O-(haloalkoxy)methyl (Arai K. et al. Bioorg. Med. Chem. 2011, 21, 6285) e.g. 2′-O-(2-chloroethoxy)methyl (MCEM), 2′-0-(2,2-dichloroethoxy)methyl (DCEM); 2′-O-alkoxycarbonyl e.g. 2′-O-[2-(methoxycarbonyl)ethyl] (MOCE), 2′-O-[2-(N-methylcarbamoyl)ethyl] (MCE), 2′-O-[2-(N,N-dimethylcarbamoyl)ethyl] (DCME), 2′-O-[2-(methylthio)ethyl] (2′-MTE), 2′-(ω-O-serinol); 2′-halo e.g. 2′-F, FANA (2′-F arabinosyl nucleic acid); 2′,4′-difluoro-2′-deoxy; carbasugar and azasugar modifications; 3′-O-substituted e.g. 3′-0-methyl, 3′-O-butyryl, 3′-O-propargyl; 4′-substituted e.g. 4′-aminomethyl-2′-O-methyl or 4′-aminomethyl-2′-fluoro; 5′-subtituted e.g. 5′-methyl or CNA (Østergaard et al. ACS Chem. Biol. 2014, 22, 6227); and their derivatives.

[0304] Depending on its length an oligonucleotide of the invention may comprise 1, 2, 3, 4, 5, 6, 7, 8, 9, 10, 11, 12, 13, 14, 15, 16, 17, 18, 19, 20, 21, 22, 23, 24, 25, 26, 27, 28, 29, 30, 31, or 32, or 33 scaffold modifications additional to the at least 1 BNA scaffold modification. It is also encompassed by the invention to introduce more than one distinct scaffold modification in said oligonucleotide.

[0305] Other modifications include unlocked nucleic acid (UNA); cyclohexenyl nucleic acid (CeNA), F-CeNA, cyclohexanyl nucleic acid (CNA), ribo-cyclohexanyl nucleic acid (r-CNA), altritol nucleic acid (ANA), hexitol nucleic acid (HNA), fluorinated HNA (F-HNA), pyranosyl-RNA (p-RNA), 3′-deoxypyranosyl-DNA (p-DNA); and their derivatives. Examples of fluorinated nucleic acid analogues with furanose and non-furanose sugar rings are also encompassed and are described in e.g. Østergaard et al. J. Org. Chem. 2014, 79, 8877.

[0306] Depending on its length an oligonucleotide of the invention may comprise 1, 2, 3, 4, 5, 6, 7, 8, 9, 10, 11, 12, 13, 14, 15, 16, 17, 18, 19, 20, 21, 22, 23, 24, 25, 26, 27, 28, 29, 30, 31, 32, 33, or 34 scaffold modifications in addition to the at least 1 BNA scaffold modification. In a preferred embodiment, an oligonucleotide of the invention is fully 2′-O-methyl modified and contains 1, 2, 3, 4, 5, or 6 BNA scaffold modifications.

[0307] Oligonucleotides according to the invention can comprise backbone linkage modifications. A backbone linkage modification can be, but is not limited to, a modified version of the phosphodiester present in RNA, such as phosphorothioate (PS), chirally pure phosphorothioate, (R)-phosphorothioate, (S)-phopshorothioate, phosphorodithioate (PS2), phosphonoacetate (PACE), phosphonoacetamide (PACA), thiophosphonoacetate (thioPACE), thiophosphonoacetamide, phosphorothioate prodrug, H-phosphonate, methyl phosphonate, methyl phosphonothioate, methyl phosphate, methyl phosphorothioate, ethyl phosphate, ethyl phosphorothioate, boranophosphate, boranophosphorothioate, methyl boranophosphate, methyl boranophosphorothioate, methyl boranophosphonate, methyl boranophosphonothioate, phosphate, phosphotriester, aminoalkylphosphotriester, and their derivatives. Another modification includes phosphoryl guanidine, phosphoramidite, phosphoramidate, N3′➙P5′ phosphoramidate, phosphordiamidate, phosphorothiodiamidate, sulfamate, dimethylenesulfoxide, amide, sulfonate, siloxane, sulfide, sulfone, formacetyl, thioformacetyl, methylene formacetyl, alkenyl, methylenehydrazino, sulfonamide, amide, triazole, oxalyl, carbamate, methyleneimino (MMI), and thioacetamido nucleic acid (TANA); and their derivatives. Examples of chirally pure phosphorothioate linkages are described in e.g. WO2014/010250 or WO2017/062862 (WaVe Life Sciences). Examples of phosphoryl guanidine linkages are described in WO2016/028187 (Noogen). Various salts, mixed salts and free acid forms are also included, as well as 3′➙3′ and 2′➙5′ linkages.

[0308] Depending on its length, an oligonucleotide of the invention may comprise 1, 2, 3, 4, 5, 6, 7, 8, 9, 10, 11, 12, 13, 14, 15, 16, 17, 18, 19, 20, 21, 22, 23, 24, 25, 26, 27, 28, 29, 30, 31, 32, or 33 backbone linkage modifications. It is also encompassed by the invention to introduce more than one distinct backbone modification in said oligonucleotide.

[0309] In a preferred embodiment, an oligonucleotide of the invention comprises at least one phosphorothioate modification. In a more preferred embodiment, an oligonucleotide of the invention is fully phosphorothioate modified. In another preferred embodiment, an oligonucleotide of the invention comprises at least one phosphate.

[0310] Other chemical modifications of an oligonucleotide of the invention include the substitution of one or more than one of any of the hydrogen atoms with deuterium or tritium, examples of which can be found in e.g. WO2014/022566 (Ased) or WO2015/011694 (Celgene).

[0311] With the advent of nucleic acid mimicking technology it has become possible to generate molecules that have a similar, preferably the same hybridization characteristics in kind not necessarily in amount as nucleic acid itself. Such functional equivalents are of course also suitable for use in the invention.

[0312] The skilled person will understand that not each scaffold, base, and/or backbone may be modified the same way. Several distinct modified scaffolds, bases and/or backbones may be combined into one single oligonucleotide of the invention.

[0313] In one embodiment, the oligonucleotides according to the invention are 10 to 33 nucleotides in length, wherein:
[0314] a) at least one monomer has formula I:

[chemical structure]

wherein:
   [0315] B is a nucleobase;
   [0316] X is F, -NR¹R², or -OR;
   [0317] R is alkenyl or optionally substituted alkyl, where the optional substituents, when present, are halo, OR¹, NR¹R², or SR¹_{;}
   [0318] R¹ is H, alkyl, cycloalkyl, aryl, heterocycloalkyl, or heteroaryl, each independently optionally further substituted with halo, hydroxy, or alkyl;
   [0319] R²is H or alkyl; and [chemical structure]
   indicates the point of attachment to the remainder of the oligonucleotide;
[0320] b) wherein at least one monomer comprises a BNA scaffold modification and has formula II:

[chemical structure]

wherein:
   [0321] B¹is a nucleobase;
   [0322] Z-Y is a divalent group selected from —(CH₂)ₙO—, —C(CH₂CH₂)O—, —CH₂WCH₂—(CH₂)ₙNR³—, —CH₂S(Oₘ)—, —CH(CH₃)O—, —CH(CH₂OCH₃)O—, —CH₂N(R³)O—, —CH₂CH₂—, C(O)NR³—, —CH═CHO—, —CH₂SO₂NR³—, and —NHC(O)NH—;
   [0323] n is 1 or 2;
   [0324] m is 0, 1 or 2;
   [0325] W is O, S or NR³;
   [0326] R³is H, —C(O)R⁴, —C(═NH)NR⁵R⁵, benzyl, or optionally substituted alkyl, where the optional substituents, when present, are selected from halo and alkoxy;
   [0327] R⁴is alkyl, cycloalkyl or aryl;
   [0328] R⁵is H or alkyl; and [chemical structure]
   indicates the point of attachment to the remainder of the oligonucleotide;
   [0329] c) wherein the monomers are linked by phosphorothioate backbone linkages and/or by phosphodiester backbone linkages; and
   [0330] d) wherein at least one nucleobase in the oligonucleotide is a 5-methylcytosine or a 5-methyluracil base.

[0331] The term “the remainder of the oligonucleotide”, as used herein, generally relates to neighbouring monomers. As a skilled person will understand, when a monomer of formula I or of formula II is a terminal monomer, a remainder of the oligonucleotide can be -H. For any monomer of formula I or of formula II, both remainders can be neighbouring monomers. In contrast, for any monomer of formula I or of formula II at most a single remainder can constitute a terminus and thus for example be -H. As is understood by a skilled person, an entire oligonucleotide has only two termini.

[0332] Z-Y is a divalent group. It is preferred that such a divalent group is connected to the 4′-position of the scaffold (near Z) with the bond on the left side of its textual representation, and to the 2′-position of the scaffold (near Y) with the bond on the right side of its textual representation. For example, when the divalent group is said to be —CH₂—O—, it is preferred that —CH₂— is connected to the 4′-position of the scaffold, and that —O— is connected to the 2′-position of the scaffold. This would form an LNA monomer.

[0333] Said oligonucleotide is preferably for use in methods or compositions according to the invention. Said nucleobase under d) may be B or B¹or another nucleobase.

[0334] In another embodiment, X is F or -OR. In another embodiment, X is F. In another embodiment, X is -OR. In another embodiment, X is F, -OCH₃or -O-CH₂CH₂OCH₃. In another embodiment, X is -OCH₃or -O-CH₂CH₂OCH₃. In another embodiment, X is -OCH₃. In another embodiment, X is F or -OCH₃. In another embodiment, X is F or -O-CH₂CH₂OCH₃.

[0335] In another embodiment, R is unsubstituted alkyl. In another embodiment, R is CH₃ or ethyl. In another embodiment, R is CH₃. In another embodiment, R is ethyl. In another embodiment, R is alkyl substituted with halo, OR¹, NR¹R²or SR¹. In another embodiment, R is alkyl substituted with OR¹or NR¹R². In another embodiment, R is alkyl substituted with OR¹.

[0336] In another embodiment, R¹ is H or unsubstituted alkyl. In another embodiment, R¹ is unsubstituted alkyl. In another embodiment, R¹is CH₃. In another embodiment, R² is H. In another embodiment, R²is alkyl. In another embodiment, R²is CH₃.

[0337] In another embodiment, Z-Y is a divalent group selected from —(CH₂)ₙO—, —C(CH₂CH₂)O—, —CH₂WCH₂—, —CH₂NR³—, —CH₂S(Oₘ)—, —CH(CH₃)O—, —CH(CH₂OCH₃)O—, —CH₂CH₂—, —C(O)NR³—, —CH═CHO—, —CH₂SO₂NR³— and —NHC(O)NH—. In another embodiment, Z-Y is a divalent group selected from —(CH₂)ₙO—, —CH₂WCH₂—, —CH₂NR³—, —CH(CH₃)O—, —CH(CH₂OCH₃)O—, —CH₂CH₂— and —C(O)NR³—. In another embodiment, Z-Y is selected from —(CH₂)ₙO—, —CH₂NR³—, —CH(CH₃)O—, —CH(CH₂OCH₃)O—, —CH₂CH₂— and —C(O)NR³—. In another embodiment, Z-Y is selected from —(CH₂)ₙO—, -CH₂OCH₂-, —CH₂NR³CH₂—, and —CH₂NR³—. In another embodiment, Z-Y is selected from —(CH₂)ₙO—, —CH₂OCH₂—, —CH₂NHCH₂—, —CH₂NH—, —CH₂N(CH₃)CH₂—, and —CH₂N(CH₃)—. In another embodiment, Z-Y is selected from —CH₂O—, —CH₂OCH₂—, —CH₂NHCH₂-, and —CH₂NH—. In another embodiment, Z-Y is selected from —CH₂O—, -CH₂OCH₂-, or —CH₂NH—. In another embodiment, Z-Y is selected from —(CH₂)ₙO—, —CH(CH₃)O— and —CH(CH₂OCH₃)O—. In another embodiment, Z-Y is —(CH₂)ₙO—. In another embodiment, Z-Y is —CH₂CH₂O—. In another embodiment, Z-Y is —CH₂O—. In another embodiment, Z-Y is —CH₂NH—.

[0338] In another embodiment, W is O, S or NH. In another embodiment, W is O. In another embodiment, W is S. In another embodiment, W is O, NH, or NCH₃. In another embodiment, W is O or NH. In another embodiment, W is NH.

[0339] In another embodiment, R³is H, -C(O)R⁴or unsubstituted alkyl. In another embodiment, R³is H, -C(O)R⁴or CH₃. In another embodiment, R³is H, -C(O)CH₃or CH₃.

[0340] In another embodiment, R⁴is alkyl. In another embodiment, R⁴ is CH₃.

[0341] In another embodiment, R⁵is H. In another embodiment, R⁵is alkyl.

[0342] In another embodiment, X is F, —OCH₃ or —O—CH₂CH₂OCH₃; and Z-Y is —(CH₂)ₙO—, —CH₂OCH₂—, —CH₂NR³CH₂—, or —CH₂NR³—. In another embodiment, X is F, —OCH₃or —O—CH₂CH₂OCH₃; and Z-Y is —(CH₂)ₙO—, -CH₂OCH₂—, —CH₂NHCH₂-, or —CH₂NH, —CH₂N(CH₃)CH₂—, or —CH₂N(CH₃)—. In another embodiment, X is F, -OCH₃or —O—CH₂CH₂OCH₃; and Z-Y is —CH₂O—, —CH₂OCH₂—, —CH₂NHCH₂—, or —CH₂NH—. In another embodiment, X is F, —OCH₃or —O—CH₂CH₂OCH₃; and Z-Y is selected from —CH₂O—, —CH₂OCH₂—, and —CH₂NH—. In another embodiment, X is F or —OCH₃; and Z-Y is selected from —CH₂O—, —CH₂OCH₂-, and —CH₂NH—. In another embodiment, X is F or OCH₃; and Z-Y is —CH20—.

[0343] In another embodiment, at least one B in the oligonucleotide is a 5-methylcytosine or a 5-methyluracil base. In another embodiment, at least one B¹in the oligonucleotide is a 5-methylcytosine or a 5-methyluracil base. In another embodiment, all of the cytosine nucleobases in the oligonucleotide are 5-methylcytosine. In another embodiment, all of the uracil nucleobases in the oligonucleotide are 5-methyluracil.

[0344] In another embodiment, the oligonucleotides are 10 to 33 nucleotides in length, wherein:
[0345] a) at least one monomer has formula I, wherein
   [0346] B is a nucleobase;
   [0347] X is F, -NR¹R², or -OR;
   [0348] R is optionally substituted alkyl, where the optional substituents, when present, are halo, OR¹, NR¹R², or SR¹;
   [0349] R¹ is H, alkyl, cycloalkyl, aryl, heterocycloalkyl, or heteroaryl, each independently optionally further substituted with halo, hydroxy or alkyl;
   [0350] R²is H or alkyl; and [chemical structure]
   indicates the point of attachment to the remainder of the oligonucleotide;
[0351] b) wherein at least one monomer comprises a BNA scaffold modification;
[0352] c) wherein the monomers are linked by phosphorothioate backbone linkages and/or by phosphodiester backbone linkages; and
[0353] d) wherein at least one nucleobase in the oligonucleotide is a 5-methylcytosine or a 5-methyluracil base.

[0354] In another embodiment, the oligonucleotides are 10 to 33 nucleotides in length, wherein:
[0355] a) at least one monomer has formula I, wherein
   [0356] B is a nucleobase;
   [0357] X is F, -NR¹R², or -OR;
   [0358] R is optionally substituted alkyl, where the optional substituents, when present, are halo, OR¹, NR¹R², or SR¹;
   [0359] R¹ is H, alkyl, cycloalkyl, aryl, heterocycloalkyl, or heteroaryl, each independently optionally further substituted with halo, hydroxy or alkyl;
   [0360] R²is H or alkyl; and [chemical structure]
   indicates the point of attachment to the remainder of the oligonucleotide;
[0361] b) wherein at least one monomer comprises a BNA scaffold modification and has formula II, wherein B¹and Z-Y are as defined above;
[0362] c) wherein the monomers are linked by phosphorothioate backbone linkages and/or by phosphodiester backbone linkages; and
[0363] d) wherein at least one nucleobase in the oligonucleotide is a 5-methylcytosine or a 5-methyluracil base.

[0364] In another embodiment, the BNA scaffold modification results in a monomer that is CRN, LNA, Xylo-LNA, α-LNA, α-L-LNA, β-D-LNA, 2′-amino-LNA, 2′-(alkylamino)-LNA, 2′-(acylamino)-LNA, 2′-thio-LNA, cEt BNA, cMOE BNA, cLNA, amido-bridged LNA; 2′,4′-BNA^{NC}(N₋H); 2′,4′-BNA^{NC}(N-Me); 2′,4′-BNA^{NC}(N-Bn), CBBN, ENA, DpNA, sulfonamide-bridged BNA, urea-bridged BNA, bicyclic carbocyclic nucleotide, TriNA, α-L-TriNA, bcDNA, tcDNA, F-bcDNA, F-tcDNA, heterocyclic-bridged BNA, locked PMO derived from 2′-amino-LNA, GuNA, or scpNA.

[0365] In another embodiment, the BNA scaffold modification results in a monomer that is CRN, LNA, Xylo-LNA, α-LNA, α-L-LNA, β-D-LNA, 2′-amino-LNA, 2′-(alkylamino)-LNA, 2′-(acylamino)-LNA, 2′-thio-LNA, cEt BNA, cMOE BNA, cLNA, amido-bridged LNA; 2′,4′-BNA^{NC}(N₋H); 2′,4′-BNA^{NC}(N-Me); 2′,4′-BNA^{NC}(N-Bn), CBBN, ENA, DpNA, sulfonamide-bridged BNA, urea-bridged BNA. In another embodiment, the BNA scaffold modification results in a monomer that is CRN, LNA, Xylo-LNA, α-LNA, α-L-LNA, β-D-LNA, 2′-amino-LNA, or 2′-(alkylamino)-LNA. In another embodiment, the BNA scaffold modification results in a monomer that is CRN, LNA, 2′-amino-LNA, or CBBN. In another embodiment, the BNA scaffold modification results in a monomer that is CRN, LNA, or 2′-amino-LNA. In another embodiment, the BNA scaffold modification results in a monomer that is LNA, Xylo-LNA, α-LNA, α-L-LNA, β-D-LNA, 2′-amino-LNA, 2′-(alkylamino)-LNA, 2′-(acylamino)-LNA, 2′-thio-LNA, cEt BNA, cMOE BNA, or cLNA. In another embodiment, the BNA scaffold modification results in a monomer that is LNA, 2′-amino-LNA, 2′-(alkylamino)-LNA, 2′-thio-LNA, cEt BNA, cMOE BNA, or cLNA. In another embodiment, the BNA scaffold modification results in a monomer that is LNA, 2′-amino-LNA, 2′-(alkylamino)-LNA, 2′,4′-BNA^{NC}(N₋H); 2′,4′-BNA^{NC}(N-Me), CBBN, or ENA. In another embodiment, the BNA scaffold modification results in a monomer that is LNA, 2′-amino-LNA, 2′,4′-BNA^{NC}(N-H), CBBN, or ENA. In another embodiment, the BNA scaffold modification results in a monomer that is LNA, CBBN, or ENA. In another embodiment, the BNA scaffold modification results in a monomer that is LNA or ENA. In another embodiment, the BNA scaffold modification results in a monomer that is LNA.

[0366] In another embodiment, the BNA scaffold modification results in a monomer that is 2′,4′-BNA^{NC}(N-H); 2′,4′-BNA^{NC}(N-Me); 2′,4′-BNA^{NC}(N-Bn), CBBN, ENA, sulfonamide-bridged BNA, or urea-bridged BNA. In another embodiment, the BNA scaffold modification results in a monomer that is 2′,4′-BNA^{NC}(N₋H); 2′,4′-BNA^{NC}(N-Me), CBBN, or ENA.

[0367] In another embodiment, the oligonucleotides are 10 to 33 nucleotides in length, wherein:
[0368] a) at least one monomer has formula I, wherein:
   [0369] B is a nucleobase;
   [0370] X is F, -OCH₃, or -O-CH₂CH₂OCH₃; and [chemical structure]
   indicates the point of attachment to the remainder of the oligonucleotide;
[0371] b) wherein at least one monomer comprises a BNA scaffold modification and has formula II, wherein
   [0372] B¹is a nucleobase;
   [0373] Z-Y is a divalent group selected from —(CH₂)ₙO—, —C(CH₂CH₂)O—, —CH₂WCH₂-, —CH₂NR³—, —CH₂S—, —CH(CH₃)O—, —CH(CH₂OCH₃)O—, —CH₂CH₂—, —C(O)NR³—, —CH═CHO—, —CH₂SO₂NR³—, and —NHC(O)NH-;
   [0374] n is 1 or 2;
   [0375] W is O, S, or NR³;
   [0376] R³is H, —C(O)R⁴, —C(═NH)NR⁵R⁵, benzyl, or optionally substituted alkyl, where the optional substituents, when present, are selected from halo and alkoxy;
   [0377] R⁴is alkyl, cycloalkyl, or aryl;
   [0378] R⁵is H or alkyl; and [chemical structure]
   indicates the point of attachment to the remainder of the oligonucleotide;
   c) wherein the monomers are linked by phosphorothioate backbone linkages and/or by phosphodiester backbone linkages; and
[0379] d) wherein at least one nucleobase in the oligonucleotide is a 5-methylcytosine or a 5-methyluracil base.

[0380] In another embodiment, the oligonucleotides are 10 to 33 nucleotides in length, wherein:
[0381] a) at least one monomer has formula I wherein:
[0382] [0383] B is a nucleobase;
[0384] X is F, —OCH₃, or —O—CH₂CH₂OCH₃; and [chemical structure]
indicates the point of attachment to the remainder of the oligonucleotide;
[0385] b) wherein one or two monomers comprise a BNA scaffold modification and have formula II, wherein:
   [0386] B¹is a nucleobase;
   [0387] Z-Y is a divalent group selected from —(CH₂)ₙO—, —C(CH₂CH₂)O—, —CH₂WCH₂—, —CH₂NR³—, —CH₂S—, —CH(CH₃)O—, —CH(CH₂OCH₃)O—, —CH₂CH₂—, —C(O)NR³—, —CH═CHO—, —CH₂SO₂NR³—, and —NHC(O)NH—;
   [0388] n is 1 or 2;
   [0389] W is O, S, or NR³;
   [0390] R³ is H, —C(O)R⁴, —C(═NH)NR⁵R⁵, benzyl, or optionally substituted alkyl, where the optional substituents, when present, are selected from halo and alkoxy;
   [0391] R⁴is alkyl, cycloalkyl, or aryl;
   [0392] R⁵ is H or alkyl; and [chemical structure]
   indicates the point of attachment to the remainder of the oligonucleotide;
[0393] c) wherein the monomers are linked by phosphorothioate backbone linkages and/or by phosphodiester backbone linkages; and
[0394] d) wherein at least one nucleobase in the oligonucleotide is a 5-methylcytosine or a 5-methyluracil base.

[0395] In another embodiment, the oligonucleotides are 10 to 33 nucleotides in length, wherein all the monomers that do not comprise a BNA scaffold modification (“the non-BNA monomers”) are modified monomers of formula I. In another embodiment, the oligonucleotides are 10 to 33 nucleotides in length, with one or two non-BNA monomers of formula I. In another embodiment, the oligonucleotides are 10 to 33 nucleotides in length, with one non-BNA monomer of formula I.

[0396] In another embodiment, the oligonucleotide comprises 1, 2, 3, 4, 5, 6, or 7 monomers comprising a BNA scaffold modification. In another embodiment, the oligonucleotide comprises 1, 2, 3, 4, 5, 6, or 7 monomers comprising a BNA scaffold modification and having formula II. In another embodiment, the oligonucleotide comprises 1, 2, 3, or 4 monomers comprising a BNA scaffold modification. In another embodiment, the oligonucleotide comprises 1, 2, 3, or 4 monomers comprising a BNA scaffold modification and having formula II. In another embodiment, the oligonucleotide comprises 1, 2, or 3 monomers comprising a BNA scaffold modification. In another embodiment, the oligonucleotide comprises 1, 2, or 3 monomers comprising a BNA scaffold modification and having formula II. In another embodiment, the oligonucleotide comprises 1 or 2 monomers comprising a BNA scaffold modification. In another embodiment, the oligonucleotide comprises 1 or 2 monomers comprising a BNA scaffold modification and having formula II. In another embodiment, the oligonucleotide comprises two monomers comprising a BNA scaffold modification. In another embodiment, the oligonucleotide comprises two monomers comprising a BNA scaffold modification and having formula II. In another embodiment, the oligonucleotide comprises one monomer comprising a BNA scaffold modification. In another embodiment, the oligonucleotide comprises one monomer comprising a BNA scaffold modification and having formula II.

[0397] In another embodiment, the oligonucleotide according to the invention comprises the sequence GGAAGAUGGCAU (SEQ ID NO: 6072). In another embodiment, the oligonucleotide according to the invention comprises a sequence selected from the group consisting of SEQ ID NOs: 453, 455, 456, 453, 455, 456, 459, 461, 462, 465, 467, 468, 471, 473, 474, 483, 486, 525, 531, 538, 539, 540, 543, 545, 546, and 4528-4572. In another embodiment, the oligonucleotide according to the invention comprises a sequence selected from the group consisting of SEQ ID NOs: 453, 455, 459, 4528, 4531, 4532, 4533, 4535, 4542, 4548, and 4568. In another embodiment, the oligonucleotide according to the invention comprises a sequence selected from the group consisting of SEQ ID NOs: 453, 455, and 456. In another embodiment, the oligonucleotide according to the invention comprises a sequence selected from the group consisting of SEQ ID NOs: 455 and 459. In another embodiment, the oligonucleotide according to the invention comprises a sequence selected from the group consisting of SEQ ID NOs: 4528, 4531, 4532, 4533, 4535, 4542, 4548, and 4568. In another embodiment, the oligonucleotide according to the invention comprises a sequence selected from the group consisting of SEQ ID NOs: 459, 4528, 4531, 4532, 4533, and 4542.

[0398] In another embodiment, the oligonucleotide according to the invention comprises the sequence GGAAGAUGGCAU (SEQ ID NO: 6072) and is for skipping exon 51 of pre-mRNA of dystrophin. In another embodiment, the oligonucleotide according to the invention comprises a sequence selected from the group consisting of SEQ ID NOs: 452-613 or SEQ ID NOs: 4528-4572 and is for skipping exon 51 of pre-mRNA of dystrophin. In another embodiment, the oligonucleotide according to the invention comprises a sequence selected from the group consisting of SEQ ID NOs: 453, 455, and 456 and is for skipping exon 51 of pre-mRNA of dystrophin. In another embodiment, the oligonucleotide according to the invention comprises a sequence selected from the group consisting of SEQ ID NOs: 455 and 459 and is for skipping exon 51 of pre-mRNA of dystrophin.

[0399] In another embodiment, the oligonucleotide according to the invention comprises the sequence GGUAAGUUCNGUCCAAGC (SEQ ID NO: 6073), wherein N is T or U. In another embodiment, the oligonucleotide according to the invention comprises the sequence GGUAAGUUCNGUCCAAGC (SEQ ID NO: 6073), wherein N is T or U, and is for skipping exon 51 of pre-mRNA of dystrophin. In another embodiment, the oligonucleotide according to the invention comprises a sequence selected from the group consisting of SEQ ID NOs: 4565-4571. In another embodiment, the oligonucleotide according to the invention comprises a sequence selected from the group consisting of SEQ ID NOs: 4565-4571 and is for skipping exon 51 of pre-mRNA of dystrophin.

[0400] In another embodiment, the oligonucleotide according to the invention comprises a sequence selected from the group consisting of SEQ ID NOs: 4561-4564 and SEQ ID NO:4572. In another embodiment, the oligonucleotide according to the invention comprises a sequence selected from the group consisting of SEQ ID NOs: 4561-4564 and SEQ ID NO:4572 and is for skipping exon 51 of pre-mRNA of dystrophin.

[0401] In another embodiment, the oligonucleotide according to the invention comprises the sequence CCCAAUUUUUCCUG (SEQ ID NO: 6074). In another embodiment, the oligonucleotide according to the invention comprises the sequence CCCAAUGCCAUCCUG (SEQ ID NO: 6075). In another embodiment, the oligonucleotide according to the invention comprises a sequence selected from the group consisting of SEQ ID NOs: 3185, 3573, 3855, 4198, and 4401. In another embodiment, the oligonucleotide according to the invention comprises a sequence selected from the group consisting of SEQ ID NOs: 3185, 3573, 3855, and 4401. In another embodiment, the oligonucleotide according to the invention comprises the sequence CCCAAUUUUUCCUG (SEQ ID NO: 6074) and is for skipping exon 45 of pre-mRNA of dystrophin. In another embodiment, the oligonucleotide according to the invention comprises the sequence CCCAAUGCCAUCCUG (SEQ ID NO: 6075) and is for skipping exon 45 of pre-mRNA of dystrophin. In another embodiment, the oligonucleotide according to the invention comprises a sequence selected from the group consisting of SEQ ID NOs: 3185, 3573, 3855, 4198, and 4401 and is for skipping exon 45 of pre-mRNA of dystrophin. In another embodiment, the oligonucleotide according to the invention comprises a sequence selected from the group consisting of SEQ ID NOs: 3185, 3573, 3855, and 4401 and is for skipping exon 45 of pre-mRNA of dystrophin.

[0402] In preferred embodiments, the oligonucleotide according to the invention comprises the sequence CUUCUGUUAGCC (SEQ ID NO: 6076). Such an oligonucleotide preferably has a length of 16 to 24 nucleotides, more preferably of 20 nucleotides. In this context, a preferred embodiment is the antisense oligonucleotide consisting of the nucleotide sequence represented by SEQ ID NO: 29.

[0403] In preferred embodiments, the oligonucleotide according to the invention comprises the sequence UAUUUAGCA (SEQ ID NO: 6077). Such an oligonucleotide preferably has a length of 16 to 24 nucleotides, more preferably of 23 nucleotides. In this context, a preferred embodiment is the antisense oligonucleotide consisting of the nucleotide sequence represented by SEQ ID NO: 161.

[0404] In preferred embodiments, the oligonucleotide according to the invention comprises the sequence GGAAUUUGU (SEQ ID NO: 6078). Such an oligonucleotide preferably has a length of 16 to 24 nucleotides, more preferably of 23 nucleotides. In this context, a preferred embodiment is the antisense oligonucleotide consisting of the nucleotide sequence represented by SEQ ID NO: 119.

[0405] In preferred embodiments, the oligonucleotide according to the invention comprises the sequence CUCAACAGA (SEQ ID NO: 6079). Such an oligonucleotide preferably has a length of 16 to 24 nucleotides, more preferably of 23 nucleotides. In this context, a preferred embodiment is the antisense oligonucleotide consisting of the nucleotide sequence represented by SEQ ID NO: 233.

[0406] When an oligonucleotide according to the invention is for skipping exon 44 of pre-mRNA of dystrophin, it is preferred that it comprises a sequence represented by SEQ ID NOs: 6076-6079.

[0407] In preferred embodiments, the oligonucleotide according to the invention comprises the sequence GCCCAAU (SEQ ID NO: 6080). Such an oligonucleotide preferably has a length of 16 to 26 nucleotides, more preferably of 25 nucleotides. In this context, a preferred embodiment is the antisense oligonucleotide consisting of the nucleotide sequence represented by SEQ ID NO: 3185.

[0408] In preferred embodiments, the oligonucleotide according to the invention comprises the sequence CCAAUUUU (SEQ ID NO: 6081). Such an oligonucleotide preferably has a length of 16 to 26 nucleotides, more preferably of 24 nucleotides. In this context, a preferred embodiment is the antisense oligonucleotide consisting of the nucleotide sequence represented by SEQ ID NO: 3573.

[0409] In preferred embodiments, the oligonucleotide according to the invention comprises the sequence GCCCAAU (SEQ ID NO: 6082). Such an oligonucleotide preferably has a length of 16 to 26 nucleotides, more preferably of 25 nucleotides. In this context, a preferred embodiment is the antisense oligonucleotide consisting of the nucleotide sequence represented by SEQ ID NO: 3855.

[0410] In preferred embodiments, the oligonucleotide according to the invention comprises the sequence UCUGACAACA (SEQ ID NO: 6083). Such an oligonucleotide preferably has a length of 16 to 24 nucleotides, more preferably of 22 nucleotides. In this context, a preferred embodiment is the antisense oligonucleotide consisting of the nucleotide sequence represented by SEQ ID NO: 4198.

[0411] In preferred embodiments, the oligonucleotide according to the invention comprises the sequence CAAUGCCAUCC (SEQ ID NO: 6084). Such an oligonucleotide preferably has a length of 16 to 24 nucleotides, more preferably of 21 nucleotides. In this context, a preferred embodiment is the antisense oligonucleotide consisting of the nucleotide sequence represented by SEQ ID NO: 4401.

[0412] When an oligonucleotide according to the invention is for skipping exon 45 of pre-mRNA of dystrophin, it is preferred that it comprises a sequence represented by SEQ ID NOs: 6074, 6075, or 6080-6084.

[0413] In preferred embodiments, the oligonucleotide according to the invention comprises the sequence AAGAUGGCAU (SEQ ID NO: 6085). Such an oligonucleotide preferably has a length of 16 to 24 nucleotides, more preferably of 22 nucleotides. In this context, a preferred embodiment is the antisense oligonucleotide consisting of the nucleotide sequence represented by SEQ ID NO: 459.

[0414] In preferred embodiments, the oligonucleotide according to the invention comprises the sequence UAAGUUCUGUCCAA (SEQ ID NO: 6086). Such an oligonucleotide preferably has a length of 16 to 24 nucleotides, more preferably of 18 nucleotides. In this context, a preferred embodiment is the antisense oligonucleotide consisting of the nucleotide sequence represented by SEQ ID NO: 4565.

[0415] When an oligonucleotide according to the invention is for skipping exon 51 of pre-mRNA of dystrophin, it is preferred that it comprises a sequence represented by SEQ ID NOs: 6072, 6073, 6085 or 6086.

[0416] In preferred embodiments, the oligonucleotide according to the invention comprises the sequence GUUGCCUCCGGUUC (SEQ ID NO: 6087). Such an oligonucleotide preferably has a length of 16 to 24 nucleotides, more preferably of 18 nucleotides. In this context, a preferred embodiment is the antisense oligonucleotide consisting of the nucleotide sequence represented by SEQ ID NO: 845.

[0417] In preferred embodiments, the oligonucleotide according to the invention comprises the sequence GGUUCUG (SEQ ID NO: 6088). Such an oligonucleotide preferably has a length of 16 to 26 nucleotides, more preferably of 25 nucleotides. In this context, a preferred embodiment is the antisense oligonucleotide consisting of the nucleotide sequence represented by SEQ ID NO: 863.

[0418] In preferred embodiments, the oligonucleotide according to the invention comprises the sequence GAUUCUGAAU (SEQ ID NO: 6089). Such an oligonucleotide preferably has a length of 16 to 24 nucleotides, more preferably of 22 nucleotides. In this context, a preferred embodiment is the antisense oligonucleotide consisting of the nucleotide sequence represented by SEQ ID NO: 4987.

[0419] In preferred embodiments, the oligonucleotide according to the invention comprises the sequence ACUUCAUC (SEQ ID NO: 6090). Such an oligonucleotide preferably has a length of 16 to 26 nucleotides, more preferably of 24 nucleotides. In this context, a preferred embodiment is the antisense oligonucleotide consisting of the nucleotide sequence represented by SEQ ID NO: 5174.

[0420] In preferred embodiments, the oligonucleotide according to the invention comprises the sequence UUCCAUGA (SEQ ID NO: 6091). Such an oligonucleotide preferably has a length of 16 to 26 nucleotides, more preferably of 24 nucleotides. In this context, a preferred embodiment is the antisense oligonucleotide consisting of the nucleotide sequence represented by SEQ ID NO: 5446.

[0421] In preferred embodiments, the oligonucleotide according to the invention comprises the sequence UGUUGCCU (SEQ ID NO: 6092). Such an oligonucleotide preferably has a length of 16 to 26 nucleotides, more preferably of 24 nucleotides. In this context, a preferred embodiment is the antisense oligonucleotide consisting of the nucleotide sequence represented by SEQ ID NO: 5765.

[0422] When an oligonucleotide according to the invention is for skipping exon 53 of pre-mRNA of dystrophin, it is preferred that it comprises a sequence represented by SEQ ID NOs: 6087-6092.

### Composition

[0423] In an aspect of the invention is provided a composition comprising at least one oligonucleotide according to the invention, preferably wherein said composition comprises at least one excipient, and/or wherein said oligonucleotide comprises at least one conjugated ligand, that may further aid in enhancing the targeting and/or delivery of said composition and/or said oligonucleotide to a tissue and/or cell and/or into a tissue and/or cell. Compositions as described here are herein referred to as compositions according to the invention. A composition according to the invention can comprise one or more than one oligonucleotide according to the invention. In the context of this invention, an excipient can be a distinct molecule, but it can also be a conjugated moiety. In the first case, an excipient can be a filler, such as starch. In the latter case, an excipient can for example be a targeting ligand that is linked to the oligonucleotide according to the invention.

[0424] In preferred embodiments of this aspect, such compositions can further comprise a cationic amphiphilic compound (CAC) or a cationic amphiphilic drug (CAD). A CAC is generally a lysosomotropic agent and a weak base that can buffer endosomes and lysosomes (Mae et al., Journal of Controlled Release 134:221-227, 2009). Compositions that further comprise a CAC preferably have an improved parameter for RNA modulation as compared to a similar composition that does not comprise said CAC. Without being bound to theory, it is thought that this is because a CAC can aid an oligonucleotide of the invention in reaching its site of activity, for example through facilitating endosomal escape. A preferred CAC as comprised in compositions of the invention is toremifene and its derivatives, analogues, and metabolites, such as N-desmethyl toremifene, tamoxifen, afimoxifene, clomiphene, droloxifene, idoxifene, miproxifene, and nafoxidine. These CACs share a common 1,1-diphenylethylene moiety. When a compound differs from a compound as described here only through minor substitutions or modifications, said compound is a derivative of such a compound, and can also be seen as an analogue thereof. Metabolites of a compound are a special class of derivatives. For compounds that are known in the art, metabolites are often also known. At least all of these known metabolites are referred to when a metabolite of a compound is referenced. For example, N-desmethyl toremifene is a known metabolite of toremifene.

[0425] In a preferred embodiment, said composition is for use as a medicament. Said composition is therefore a pharmaceutical composition. A pharmaceutical composition usually comprises a pharmaceutically accepted carrier, diluent and/or excipient. In a preferred embodiment, a composition of the current invention comprises a compound as defined herein and optionally further comprises a pharmaceutically acceptable formulation, filler, preservative, solubilizer, carrier, diluent, excipient, salt, adjuvant and/or solvent. Such pharmaceutically acceptable carrier, filler, preservative, solubilizer, diluent, salt, adjuvant, solvent and/or excipient may for instance be found in Remington: The Science and Practice of Pharmacy, 20th Edition. Baltimore, MD: Lippincott Williams & Wilkins, 2000. The compound as described in the invention may possess at least one ionizable group. An ionizable group may be a base or acid, and may be charged or neutral. An ionizable group may be present as ion pair with an appropriate counterion that carries opposite charge(s). Examples of cationic counterions are sodium, potassium, cesium, Tris, lithium, calcium, magnesium, trialkylammonium, triethylammonium, and tetraalkylammonium. Examples of anionic counterions are chloride, bromide, iodide, lactate, mesylate, besylate, triflate, acetate, trifluoroacetate, dichloroacetate, tartrate, lactate, and citrate. Examples of counterions have been described [e.g. Kumar, 2008] which is incorporated here in its entirety by reference].

[0426] A pharmaceutical composition may comprise an aid in enhancing the stability, solubility, absorption, bioavailability, activity, pharmacokinetics, pharmacodynamics, cellular uptake, and intracellular trafficking of said compound, in particular an excipient capable of forming complexes, nanoparticles, microparticles, nanotubes, nanogels, hydrogels, poloxamers or pluronics, polymersomes, colloids, microbubbles, vesicles, micelles, lipoplexes, and/or liposomes. Examples of nanoparticles include polymeric nanoparticles, (mixed) metal nanoparticles, carbon nanoparticles, gold nanoparticles, magnetic nanoparticles, silica nanoparticles, lipid nanoparticles, sugar particles, protein nanoparticles and peptide nanoparticles. An example of the combination of nanoparticles and oligonucleotides is spherical nucleic acid (SNA), as in e.g. Barnaby et al. Cancer Treat. Res. 2015, 166, 23.

[0427] A preferred composition comprises at least one excipient that may further aid in enhancing the targeting and/or delivery of said composition and/or said oligonucleotide to a tissue and/or a cell and/or into a tissue and/or a cell. A preferred tissue or cell is a muscle tissue or cell.

[0428] Many of these excipients are known in the art (e.g. see Bruno, 2011) and may be categorized as a first type of excipient. Examples of first type of excipients include polymers (e.g. polyethyleneimine (PEI), polypropyleneimine (PPI), dextran derivatives, butylcyanoacrylate (PBCA), hexylcyanoacrylate (PHCA), poly(lactic-co-glycolic acid) (PLGA), polyamines (e.g. spermine, spermidine, putrescine, cadaverine), chitosan, poly(amido amines) (PAMAM), poly(ester amine), polyvinyl ether, polyvinyl pyrrolidone (PVP), polyethylene glycol (PEG) cyclodextrins, hyaluronic acid, colominic acid, and derivatives thereof), dendrimers (e.g. poly(amidoamine)), lipids {e.g. 1,2-dioleoyl-3-dimethylammonium propane (DODAP), dioleoyldimethylammonium chloride (DODAC), phosphatidylcholine derivatives [e.g 1,2- distearoyl-sn-glycero-3-phosphocholine (DSPC)], lyso-phosphatidylcholine derivaties [e.g. 1-stearoyl-2-lyso-sn-glycero-3-phosphocholine (S-LysoPC)], sphingomyeline, 2-{3-[Bis-(3-amino-propyl)-amino]-propylamino}-N-ditetracedyl carbamoyl methylacetamide (RPR209120), phosphoglycerol derivatives [e.g. 1,2-dipalmitoyl-sn-glycero-3-phosphoglycerol,sodium salt (DPPG-Na), phosphaticid acid derivatives [1,2-distearoyl-sn-glycero-3-phosphaticid acid, sodium salt (DSPA), phosphatidylethanolamine derivatives [e.g. dioleoyl-L-R-phosphatidylethanolamine (DOPE), 1,2-distearoyl-sn-glycero-3-phosphoethanolamine (DSPE),2-diphytanoyl-sn-glycero-3-phosphoethanolamine (DPhyPE),], N-[1-(2,3-dioleoyloxy)propyl]-N,N,N-trimethylammonium (DOTAP), N-[1-(2,3-dioleyloxy)propyl]-N,N,N-trimethylammonium (DOTMA), 1,3-di-oleoyloxy-2-(6-carboxy-spermyl)-propylamid (DOSPER), (1,2-dimyristyolxypropyl-3-dimethylhydroxy ethyl ammonium (DMRIE), (N1-cholesteryloxycarbonyl-3,7-diazanonane-1,9-diamine (CDAN), dimethyldioctadecylammonium bromide (DDAB), 1-palmitoyl-2-oleoyl-sn-glycerol-3-phosphocholine (POPC), (b-L-Arginyl-2,3-L-diaminopropionic acid-N-palmityl-N-olelyl-amide trihydrochloride (AtuFECT01), N,N-dimethyl-3-aminopropane derivatives [e.g. 1,2-distearoyloxy-N,N-dimethyl-3-aminopropane (DSDMA), 1,2-dioleyloxy-N,N-dimethyl-3-aminopropane (DoDMA), 1,2-Dilinoleyloxy-N,N-3-dimethylaminopropane (DLinDMA), 2,2-dilinoleyl-4-dimethylaminomethyl [1,3]-dioxolane (DLin-K-DMA), phosphatidylserine derivatives [1,2-dioleyl-sn-glycero-3-phospho-L-serine, sodium salt (DOPS)], proteins (e.g. albumin, gelatins, atellocollagen), and linear or cyclic peptides (e.g. protamine, PepFects, NickFects, polyarginine, polylysine, CADY, MPG, cell-penetrating peptides (CPPs), targeting peptides, cell-translocating peptides, endosomal escape peptides). Examples of such peptides have been described, e.g. muscle targeting peptides (e.g. Jirka et al., Nucl. Acid Ther. 2014, 24, 25), CPPs (e.g. Pip series, including WO2013/030569, and oligoarginine series, e.g. US9,161,948 (Sarepta), WO2016/187425 (Sarepta), and M12 peptide in e.g. Gao et al., Mol. Ther. 2014, 22, 1333), or blood-brain barrier (BBB) crossing peptides such as (branched) ApoE derivatives (Shabanpoor et al., Nucl. Acids Ther. 2017, 27, 130). Carbohydrates and carbohydrate clusters as described below, when used as distinct compounds, are also suitable for use as a first type of excipient.

[0429] Another preferred composition may comprise at least one excipient categorized as a second type of excipient. A second type of excipient may comprise or contain a conjugate group as described herein to enhance targeting and/or delivery of the composition and/or of the oligonucleotide of the invention to a tissue and/or cell and/or into a tissue and/or cell, as for example muscle tissue or cell. The conjugate group may display one or more different or identical ligands. Examples of conjugate group ligands are e.g. peptides, vitamins, aptamers, carbohydrates or mixtures of carbohydrates (Han et al., Nature Communications, 2016, doi:10.1038/ncomms10981; Cao et al., Mol. Ther. Nucleic Acids, 2016, doi: 10.1038/mtna.2016.46), proteins, small molecules, antibodies, polymers, drugs. Examples of carbohydrate conjugate group ligands are glucose, mannose, galactose, maltose, fructose, N-acetylgalactosamine (GalNac), glucosamine, N-acetylglucosamine, glucose-6-phosphate, mannose-6-phosphate, and maltotriose. Carbohydrates may be present in plurality, for example as end groups on dendritic or branched linker moieties that link the carbohydrates to the component of the composition. A carbohydrate can also be comprised in a carbohydrate cluster portion, such as a GalNAc cluster portion. A carbohydrate cluster portion can comprise a targeting moiety and, optionally, a conjugate linker. In some embodiments, the carbohydrate cluster portion comprises 1, 2, 3, 4, 5, 6, or more GalNAc groups. As used herein, “carbohydrate cluster” means a compound having one or more carbohydrate residues attached to a scaffold or linker group, (see, e.g., Maier et al., “Synthesis of Antisense Oligonucleotides Conjugated to a Multivalent Carbohydrate Cluster for Cellular Targeting,” Bioconjugate Chem., 2003, (14): 18-29; Rensen et al., “Design and Synthesis of Novel N-Acetylgalactosamine-Terminated Glycolipids for Targeting of Lipoproteins to the Hepatic Asiaglycoprotein Receptor,” J. Med. Chem. 2004, (47): 5798-5808). In this context, “modified carbohydrate” means any carbohydrate having one or more chemical modifications relative to naturally occurring carbohydrates. As used herein, “carbohydrate derivative” means any compound which may be synthesized using a carbohydrate as a starting material or intermediate. As used herein, “carbohydrate” means a naturally occurring carbohydrate, a modified carbohydrate, or a carbohydrate derivative. Both types of excipients may be combined together into one single composition as identified herein. An example of a trivalent N-acetylglucosamine cluster is described in WO2017/062862 (Wave Life Sciences), which also describes a cluster of sulfonamide small molecules. An example of a single conjugate of the small molecule sertraline has also been described (Ferrés-Coy et al., Mol. Psych. 2016, 21, 328), as well as conjugates of protein-binding small molecules, including ibuprofen (e.g. US 6,656,730 ISIS/Ionis Pharmaceuticals), spermine (e.g. Noir et al., J. Am. Chem Soc. 2008, 130, 13500), anisamide (e.g. Nakagawa et al., J. Am. Chem. Soc. 2010, 132, 8848) and folate (e.g. Dohmen et al., Mol. Ther. Nucl. Acids 2012, 1, e7).

[0430] Conjugates of oligonucleotides with aptamers are known in the art (e.g. Zhao et al. Biomaterials 2015, 67, 42).

[0431] Antibodies and antibody fragments can also be conjugated to an oligonucleotide of the invention. In a preferred embodiment, an antibody or fragment thereof targeting tissues of specific interest, particularly muscle tissue, is conjugated to an oligonucleotide of the invention. Examples of such antibodies and/or fragments are e.g. targeted against CD71 (transferrin receptor), described in e.g. WO2016/179257 (CytoMx) and in Sugo et al. J. Control. Rel. 2016, 237, 1, or against equilibrative nucleoside transporter (ENT), such as the 3E10 antibody, as described in e.g. Weisbart et al., Mol. Cancer Ther. 2012, 11, 1.

[0432] Other oligonucleotide conjugates are known to those skilled in the art, and have been reviewed in e.g. Winkler et al., Ther. Deliv. 2013, 4, 791, Manoharan, Antisense Nucl. Acid. Dev. 2004, 12, 103 and Ming et al., Adv. Drug Deliv. Rev. 2015, 87, 81.

[0433] The skilled person may select, combine and/or adapt one or more of the above or other alternative excipients and delivery systems to formulate and deliver a compound for use in the present invention.

[0434] Such a pharmaceutical composition of the invention may be administered in an effective concentration at set times to an animal, preferably a mammal. More preferred mammal is a human being. An oligonucleotide or a composition as defined herein for use according to the invention may be suitable for direct administration to a cell, tissue and/or an organ in vivo of individuals affected by or at risk of developing a disease or condition as identified herein, and may be administered directly in vivo, ex vivo or in vitro. Administration may be via topical, systemic and/or parenteral routes, for example intravenous, subcutaneous, intraperitoneal, intrathecal, intramuscular, ocular, nasal, urogenital, intradermal, dermal, enteral, intravitreal, intracavernous, intracerebral, intrathecal, epidural or oral route.

[0435] Preferably, such a pharmaceutical composition of the invention may be encapsulated in the form of an emulsion, suspension, pill, tablet, capsule or soft-gel for oral delivery, or in the form of aerosol or dry powder for delivery to the respiratory tract and lungs.

[0436] In an embodiment an oligonucleotide of the invention may be used together with another compound already known to be used for the treatment of said disease. Such other compounds may be used for reducing inflammation, preferably for reducing muscle tissue inflammation, and/or an adjunct compound for improving muscle fiber function, integrity and/or survival and/or improve, increase or restore cardiac function.

[0437] Examples are, but not limited to, a steroid, preferably a (gluco)corticosteroid, epicatechin, an ACE inhibitor (preferably perindopril), and HDAC inhibitor, an angiotensin II type 1 receptor blocker (preferably losartan), angiotensin peptide (1-7), a tumor necrosis factor-alpha (TNFα) inhibitor, an NF-kB inhibitor, a TGFβ inhibitor (preferably decorin), human recombinant biglycan, a source of mIGF-1, a myostatin inhibitor, mannose-6-phosphate, an antioxidant, an ion channel inhibitor, dantrolene, a protease inhibitor, a phosphodiesterase inhibitor (preferably a PDE5 inhibitor, such as sildenafil or tadalafil), and/or L-arginine. Such combined use may be a sequential use: each component is administered in a distinct fashion, perhaps as a distinct composition. Alternatively each compound may be used together in a single composition.

[0438] Compounds that are comprised in a composition according to the invention can also be provided separately, for example to allow sequential administration of the active components of the composition according to the invention. In such a case, the composition according to the invention is a combination of compounds comprising at least an oligonucleotide according to the invention with or without a conjugated ligand, at least one excipient, and optionally a CAC as described above.

### Use

[0439] In a further aspect, there is provided the use of a composition or an oligonucleotide as described in the previous sections for use as a medicament or part of therapy, or applications in which said oligonucleotide exerts its activity intracellularly.

[0440] Preferably, an oligonucleotide or composition of the invention is for use as a medicament or part of a therapy for preventing, delaying, curing, ameliorating and/or treating DMD or BMD or SMA.

[0441] In an embodiment of this aspect of the invention is provided the oligonucleotide according to the invention, or the composition according to the invention, for use as a medicament, preferably for treating, preventing, and/or delaying Duchenne Muscular Dystrophy (DMD), Becker Muscular Dystrophy (BMD), or Spinal Muscular Atrophy (SMA).

### Method

[0442] In a further aspect, there is provided a method for preventing, treating, curing, ameliorating and/or delaying a condition or disease as defined in the previous section in an individual, in a cell, tissue or organ of said individual. The method comprises administering an oligonucleotide or a composition of the invention to said individual or a subject in the need thereof.

[0443] The method according to the invention wherein an oligonucleotide or a composition as defined herein may be suitable for administration to a cell, tissue and/or an organ in vivo of individuals affected by any of the herein defined diseases or at risk of developing an inflammatory disorder, and may be administered in vivo, ex vivo or in vitro. An individual or a subject in need is preferably a mammal, more preferably a human being. Alternately, a subject is not a human. Administration may be via topical, systemic and/or parenteral routes, for example intravenous, subcutaneous, nasal, ocular, intraperitoneal, intrathecal, intramuscular, intracavemous, urogenital, intradermal, dermal, enteral, intravitreal, intracerebral, intrathecal, epidural or oral route.

[0444] In an embodiment, in a method of the invention, a concentration of an oligonucleotide or composition is ranged from 0.01 nM to 1 µM. More preferably, the concentration used is from 0.05 to 500 nM, or from 0.1 to 500 nM, or from 0.02 to 500 nM, or from 0.05 to 500 nM, even more preferably from 1 to 200 nM.

[0445] Dose ranges of an oligonucleotide or composition according to the invention are preferably designed on the basis of rising dose studies in clinical trials (in vivo use) for which rigorous protocol requirements exist. An oligonucleotide as defined herein may be used at a dose which is ranged from 0.01 to 200 mg/kg or 0.05 to 100 mg/kg or 0.1 to 50 mg/kg or 0.1 to 20 mg/kg, preferably from 0.5 to 10 mg/kg.

[0446] The ranges of concentration or dose of oligonucleotide or composition as given above are preferred concentrations or doses for in vitro or ex vivo uses. The skilled person will understand that depending on the identity of the oligonucleotide used, the target cell to be treated, the gene target and its expression levels, the medium used and the transfection and incubation conditions, the concentration or dose of oligonucleotide used may further vary and may need to be optimised any further.

[0447] In an embodiment of this aspect of the invention is provided a method for preventing, treating, and/or delaying Duchenne Muscular Dystrophy (DMD), Becker Muscular Dystrophy (BMD), or Spinal Muscular Atrophy (SMA), comprising administering to a subject an oligonucleotide according to the invention, or a composition according to the invention.

### Particular Embodiments of the Invention

[0448] 1. An oligonucleotide comprising:
[0449] i) Ia) at least one 2′-substituted monomer and optionally a phosphorothioate backbone linkage, or
[0450] Ib) only 2′-substituted monomers linked by phosphorothioate backbone linkages and/or by phosphodiester linkages,
[0451] ii) a 5-methylcytosine and/or a 5-methyluracil base and
[0452] iii) at least one monomer comprising a bicyclic nucleic acid (BNA) scaffold modification.

[0453] 2. An oligonucleotide according to embodiment 1, wherein said oligonucleotide comprises 1, 2, 3, or 4 monomers that comprise a bicyclic nucleic acid (BNA) scaffold modification, preferably a bridged nucleic acid scaffold modification.

[0454] 3. An oligonucleotide according to embodiment 1 or 2, wherein at least one bicyclic nucleic acid (BNA) scaffold modification is comprised in a terminal monomer of said oligonucleotide, preferably in the 5′-terminal monomer of said oligonucleotide, more preferably in both terminal monomers of said oligonucleotide.

[0455] 4. An oligonucleotide according to any one of embodiments 1 to 3, wherein each occurrence of said bicyclic nucleic acid (BNA) scaffold modification results in a monomer that is independently chosen from the group consisting of a conformationally restrained nucleotide (CRN) monomer, a locked nucleic acid (LNA) monomer, a xylo-LNA monomer, an α-L-LNA monomer, a β-D-LNA monomer, a 2′-amino-LNA monomer, a 2′-(alkylamino)-LNA monomer, a 2′-(acylamino)-LNA monomer, a 2′-N-substituted-2′-amino-LNA monomer, a (2′-0,4′-C) constrained ethyl (cEt) LNA monomer, a (2′-0,4′-C) constrained methoxyethyl (cMOE) BNA monomer, a 2′,4′-BNA^{NC}(N-H) monomer, a 2′,4′-BNA^{NC}(N-Me) monomer, an ethylene-bridged nucleic acid (ENA) monomer, a 2′-C-bridged bicyclic nucleotide (CBBN) monomer, and derivatives thereof.

[0456] 5. An oligonucleotide according to any one of embodiments 1 to 4, wherein said 2′-substituted monomer is a 2′-substituted RNA monomer, a 2′ -F monomer, a 2′-amino monomer, a 2′-O-substituted monomer, a 2′-O-methyl monomer, or a 2′-O-(2-methoxyethyl) monomer, preferably a 2′-O-methyl monomer.

[0457] 6. An oligonucleotide according to any one of embodiments 1 to 5, wherein all cytosine bases are 5-methylcytosine bases, and/or wherein all uracil bases are 5-methyluracil bases.

[0458] 7. An oligonucleotide according to any one of embodiments 1 to 6, wherein the length of said oligonucleotide is less than 34 nucleotides.

[0459] 8. An oligonucleotide according to any one of embodiments 1 to 7, wherein said oligonucleotide is complementary to or binds to or targets or hybridizes with at least a part of an exon and/or non-exon region, preferably wherein said oligonucleotide comprises or consists of a sequence which is complementary to or binds or targets or hybridizes at least a part of an exon recognition sequence (ERS), an exonic splicing silencer (ESS), an intronic splicing silencer (ISS), an SR protein binding site, or another splicing element, signal, or structure.

[0460] 9. An oligonucleotide according to embodiment 8, wherein said at least part of an exon and/or non-exon region has a length of 10 to 33 nucleotides.

[0461] 10. An oligonucleotide according to embodiment 8 or 9, wherein said exon and/or non-exon region is in a DMD gene or in an SMN gene.

[0462] 11. An oligonucleotide according to any one of embodiments 1 to 10, wherein said oligonucleotide is represented by a nucleotide sequence comprising or consisting of SEQ ID NO: 8-1580, or by a nucleotide sequence comprising or consisting of a fragment of SEQ ID NO: 8-1580, preferably wherein said oligonucleotide is represented by a nucleotide sequence comprising or consisting of SEQ ID NO: 453, 455, 456, 459, 461, 462, 465, 467, 468, 471, 473, 474, 483, or 486, or by a nucleotide sequence comprising or consisting of a fragment of SEQ ID NO: 453, 455, 456, 459, 461, 462, 465, 467, 468, 471, 473, 474, 483, or 486.

[0463] 12. An oligonucleotide according to any one of embodiments 1 to 11, wherein said oligonucleotide induces pre-mRNA splicing modulation, preferably said pre-mRNA splicing modulation alters production or composition of protein, which preferably comprises exon skipping or exon inclusion, wherein said RNA modulation most preferably comprises exon skipping.

[0464] 13. An oligonucleotide according to any one of embodiments 1 to 12, wherein said oligonucleotide induces pre-mRNA splicing modulation, wherein said pre-mRNA splicing modulation alters production of protein that is related to a disease or a condition, preferably wherein said disease or condition is Duchenne Muscular Dystrophy (DMD), Becker Muscular Dystrophy (BMD), or Spinal Muscular Atrophy (SMA).

[0465] 14. An oligonucleotide according to any one of embodiments 1 to 13, wherein said oligonucleotide has an improved parameter by comparison to a corresponding oligonucleotide that does not comprise a bicyclic nucleic acid (BNA) scaffold modification.

[0466] 15. A composition comprising an oligonucleotide as defined in any one of embodiments 1 to 14, preferably wherein said composition comprises at least one excipient that may further aid in enhancing the targeting and/or delivery of said composition and/or said oligonucleotide to a tissue and/or cell and/or into a tissue and/or cell.

[0467] 16. An oligonucleotide according to any one of embodiments 1 to 14, or a composition according to claim 15, for use as a medicament, preferably for treating, preventing, and/or delaying Duchenne Muscular Dystrophy (DMD), Becker Muscular Dystrophy (BMD), or Spinal Muscular Atrophy (SMA).

[0468] 17. A method for preventing, treating, and/or delaying Duchenne Muscular Dystrophy (DMD), Becker Muscular Dystrophy (BMD), or Spinal Muscular Atrophy (SMA), comprising administering to a subject an oligonucleotide as defined in any one of embodiments 1 to 14, or a composition as defined in claim 15.

[0469] 18. An oligonucleotide of 10 to 33 nucleotides in length, wherein:
[0470] a) at least one monomer has formula I:

[chemical structure]

wherein:
   [0471] B is a nucleobase;
   [0472] X is F, -NR¹R², or -OR;
   [0473] R is alkenyl or optionally substituted alkyl, where the optional substituents, when present, are halo, OR¹, NR¹R², or SR¹;
   [0474] R¹ is H, alkyl, cycloalkyl, aryl, heterocycloalkyl, or heteroaryl, each independently optionally further substituted with halo, hydroxy, or alkyl;
   [0475] R²is H or alkyl; and [chemical structure]
   indicates the point of attachment to the remainder of the oligonucleotide;
[0476] b) wherein at least one monomer comprises a BNA scaffold modification and has formula II:

[chemical structure]

wherein:
   [0477] B¹is a nucleobase;
   [0478] Z-Y is a divalent group selected from —(CH₂)ₙO—, —C(CH₂CH₂)O—, —CH₂WCH₂—, —(CH₂)ₙNR³—, —CH₂S(Oₘ)—, —CH(CH₃)O—, —CH(CH₂OCH₃)O—, —CH₂N(R³)O—, —CH₂CH₂—, —C(O)NR³—, —CH═CHO—, —CH₂SO₂NR³—, and
   [0479] -NHC(O)NH-;
   [0480] n is 1 or 2;
   [0481] m is 0, 1 or 2;
   [0482] W is O, S, or NR³;
   [0483] R³is H, -C(O)R⁴, -C(=NH)NR⁵R⁵, benzyl, or optionally substituted alkyl, where the optional substituents, when present, are selected from halo and alkoxy;
   [0484] R⁴is alkyl, cycloalkyl or aryl;
   [0485] R⁵is H or alkyl; and [chemical structure]
   indicates the point of attachment to the remainder of the oligonucleotide;
[0486] c) wherein the monomers are linked by phosphorothioate backbone linkages and/or by phosphodiester backbone linkages; and
[0487] d) wherein at least one nucleobase in the oligonucleotide is a 5-methylcytosine or a 5-methyluracil base.

[0488] 19. The oligonucleotide according to embodiment 18, wherein R is unsubstituted alkyl, or —CH₃, or —CH₂CH₃.

[0489] 20. The oligonucleotide according to embodiment 18 or 19, wherein R¹is CH₃.

[0490] 21. The oligonucleotide according to any of embodiments 18-20, wherein X is F or -OR.

[0491] 22. The oligonucleotide according to any of embodiments 18-21, wherein X is F or -OCH₃.

[0492] 23. The oligonucleotide of any of embodiments 18-22, wherein Z-Y is a divalent group selected from the group consisting of —(CH₂)ₙO—, —CH(CH₃)O—, and —CH(CH₂OCH₃)O—.

[0493] 24. The oligonucleotide according to any of embodiments 18-23, wherein Z-Y is —CH₂O—. Preferably, Z is —CH₂— and Y is —O—.

[0494] 25. The oligonucleotide according to any of embodiments 18-24, wherein the oligonucleotide comprises the sequence GGAAGAUGGCAU (SEQ ID NO: 6072).

[0495] 26. The oligonucleotide according to any of embodiments 18-25, wherein the oligonucleotide has a length of 16, 17, 18, 19, 20, 21, or 22 nucleotides.

[0496] 27. The oligonucleotide according to any of embodiments 18-26, wherein the oligonucleotide has a length of 19, 20 or 22 nucleotides.

[0497] 28. The oligonucleotide according to any of embodiments 18-27, wherein the oligonucleotide has a length of 20 or 22 nucleotides.

[0498] 29. The oligonucleotide according to any of embodiments 18-28, wherein the oligonucleotide has a length of 20 nucleotides.

[0499] 30. The oligonucleotide according to any of embodiments 18-28, wherein the oligonucleotide has a length of 22 nucleotides.

[0500] 31. The oligonucleotide according to any of embodiments 18-27, wherein the oligonucleotide has a length of 19 nucleotides.

[0501] 30. The oligonucleotide according to any of embodiments 18-27, wherein the oligonucleotide is represented by a sequence comprising or consisting of a sequence selected from SEQ ID NO: 453, 455, 459, 4528, 4531, 4532, 4533, 4535, 4542, 4548, and 4568.

[0502] 31. The oligonucleotide according to any of embodiments 18-26, wherein the oligonucleotide is represented by a sequence consisting of a sequence selected from SEQ ID NO: 453, 455, 459, 4528, 4531, 4532, 4533, 4535, 4542, 4548, and 4568.

[0503] 32. The oligonucleotide according to any of embodiments 18-31, wherein said oligonucleotide induces pre-mRNA splicing modulation, preferably said pre-mRNA splicing modulation alters production or composition of protein, which preferably comprises exon skipping or exon inclusion, wherein said RNA modulation most preferably comprises exon skipping.

[0504] 33. The oligonucleotide according to any of embodiments 18-32, wherein said oligonucleotide induces pre-mRNA splicing modulation, wherein said pre-mRNA splicing modulation alters production of protein that is related to a disease or a condition, preferably wherein said disease or condition is Duchenne Muscular Dystrophy (DMD), Becker Muscular Dystrophy (BMD), or Spinal Muscular Atrophy (SMA).

[0505] 34. The oligonucleotide according to any of embodiments 18-33, wherein said oligonucleotide induces pre-mRNA splicing modulation, wherein said pre-mRNA splicing modulation alters production of protein that is related to Duchenne Muscular Dystrophy (DMD).

[0506] 35. The oligonucleotide according to any of embodiments 18-33, wherein said oligonucleotide induces pre-mRNA splicing modulation, wherein said pre-mRNA splicing modulation alters production of protein that is related to Becker Muscular Dystrophy (BMD).

[0507] 36. The oligonucleotide according to any of embodiments 18-33, wherein said oligonucleotide induces pre-mRNA splicing modulation, wherein said pre-mRNA splicing modulation alters production of protein that is related to Spinal Muscular Atrophy (SMA).

[0508] 37. The oligonucleotide according to any of embodiments 18-36, wherein said oligonucleotide has an improved parameter by comparison to a corresponding oligonucleotide that does not comprise a bicyclic nucleic acid (BNA) scaffold modification.

### Definitions

[0509] In this document and in its claims, the verb “to comprise” and its conjugations is used in its non-limiting sense to mean that items following the word are included, but items not specifically mentioned are not excluded. In addition the verb “to consist” may be replaced by “to consist essentially of” meaning that an oligonucleotide or a composition as defined herein may comprise additional component(s) than the ones specifically identified, said additional component(s) not altering the unique characteristic of the invention. In addition, reference to an element by the indefinite article “a” or “an” does not exclude the possibility that more than one of the element is present, unless the context clearly requires that there be one and only one of the elements. The indefinite article “a” or “an” thus usually means “at least one”.

[0510] Each embodiment as identified herein may be combined together unless otherwise indicated. All patent and literature references cited in the present specification are hereby incorporated by reference in their entirety.

[0511] Throughout the application, the word “binds”, “targets”, “hybridizes” could be used interchangeably when used in the context of an antisense oligonucleotide which is complementary, preferably reverse complementary, to a part of a pre-mRNA as identified herein. In the context of the invention, “hybridizes” is used under physiological conditions in a cell, preferably a muscular cell unless otherwise indicated.

[0512] When a structural formula or chemical name is understood by the skilled person to have chiral centers, yet no chirality is indicated, for each chiral center individual reference is made to all three of either the racemic mixture, the pure R enantiomer, and the pure S enantiomer.

[0513] Whenever a parameter of a substance is discussed in the context of this invention, it is assumed that unless otherwise specified, the parameter is determined, measured, or manifested under physiological conditions. Physiological conditions are known to a person skilled in the art, and comprise aqueous solvent systems, atmospheric pressure, pH-values between 6 and 8, a temperature ranging from room temperature to about 37° C. (from about 20° C. to about 40° C.), and a suitable concentration of buffer salts or other components. It is understood that charge is often associated with equilibrium. A moiety that is said to carry or bear a charge is a moiety that will be found in a state where it bears or carries such a charge more often than that it does not bear or carry such a charge. As such, an atom that is indicated in this disclosure to be charged could be non-charged under specific conditions, and a neutral moiety could be charged under specific conditions, as is understood by a person skilled in the art.

[0514] Generally, a substitution replaces one moiety, which might be hydrogen, by another moiety. When considering the carbon skeleton of organic molecules, an RNA monomer is inherently 2′-substituted because it has a hydroxyl moiety at its 2′-position. A DNA monomer would therefore not be 2′-substituted, and an RNA monomer can be seen as a 2′-substituted DNA monomer. When an RNA monomer in turn is 2′-substituted, this substitution can have replaced either the 2′-OH or the 2′-H. When an RNA monomer is 2′-O-substituted, this substitution replaces the H of the 2′-OH moiety. As a non-limiting example, 2′-O-methyl RNA is a 2′-substituted monomer (-OMe substitutes -H) and a 2′-substituted RNA monomer (-OMe substitutes -OH) and a 2′-O-substituted RNA monomer (-Me substitutes -H), while 2′-F RNA is a 2′-substituted RNA monomer (-F substitutes -OH or -H) yet not a 2′-O-substituted RNA monomer (2′-O is either no longer present, or is not substituted). 2′-F RNA where F substituted 2′-OH is 2′-F-2′-deoxy RNA, which is also 2′-F DNA.

[0515] “Alkenyl” means a straight or branched hydrocarbon radical having from 2 to 8 carbon atoms and at least one double bond. In certain embodiments, alkenyl includes ethenyl, propenyl, 1 but-3-enyl, 1 pent-3-enyl, and 1-hex-5-enyl.

[0516] “Alkoxy” means a group of the formula -OR, where R is alkyl. In certain embodiments, alkoxy includes methoxy, ethoxy, propoxy, 2-propoxy, butoxy, tert-butoxy, pentyloxy, and hexyloxy.

[0517] “Alkyl” means a straight or branched saturated hydrocarbon radical containing from 1-20 carbon atoms, and in certain embodiments includes 1-6 carbon atoms. In certain embodiments, alkyl includes 1-4 carbon atoms, and in certain embodiments includes 1-3 carbon atoms._In certain embodiments, alkyl includes methyl, ethyl, n-propyl, iso-propyl, n-butyl, sec-butyl, tert-butyl, n-pentyl, isopentyl, neopentyl, n-hexyl, 3-methylhexyl, 2,2-dimethylpentyl, 2,3-dimethylhexyl, n-heptyl, n-octyl, n-nonyl, and n-decyl.

[0518] “Aryl” means a monovalent six- to fourteen-membered, mono-, bi-, or tri-carbocyclic ring, wherein the monocyclic ring is aromatic and at least one of the rings in the bicyclic or tricyclic ring is aromatic. In certain embodiments, aryl includes phenyl, naphthyl, indanyl, and anthracenyl.

[0519] “Cycloalkyl” means a monocyclic or bicyclic, saturated or partially unsaturated (but not aromatic), hydrocarbon radical of three to ten carbon ring atoms. In certain embodiments, the cycloalkyl group contains from 5-6 carbon atoms, it may be referred to herein as C₅-₆ cycloalkyl. Cycloalkyl groups include fused, bridged and spirocycloalkyl bicyclic rings. For example, when fused, the cycloalkyl group may comprise two rings that share adjacent atoms (e.g., one covalent bond). When bridged, the cycloalkyl group may comprise two rings that share three or more atoms, separating the two bridgehead atoms by a bridge containing at least one atom. When spiro, the cycloalkyl group may comprise two rings that share only one single atom, the spiro atom, which may be, for example, a quaternary carbon. In certain embodiments, cycloalkyl groups include cyclopropyl, cyclobutyl, cyclopentyl, and cyclohexyl. In certain embodiments, cycloalkyl groups include:

[chemical structure]

[chemical structure]

[chemical structure]

[chemical structure]

[chemical structure]

[chemical structure]

[chemical structure]

[chemical structure]

[chemical structure]

[chemical structure]

[chemical structure]

[chemical structure]

[chemical structure]

[chemical structure]

[0520] “Halo” means a fluoro, chloro, bromo, or iodo group. “Halo” preferably means fluoro. “Halo” can be replaced by a halogen. Preferred halogens are fluorine, chlorine, bromine, or iodine. A most preferred halogen is fluorine.

[0521] “Heteroaryl” means monocyclic, fused bicyclic, or fused tricyclic, radical of 5 to 14 ring atoms containing one or more, in another example one, two, three, or four ring heteroatoms independently selected from -O-, -S(O)ₙ- (n is 0, 1, or 2), -N= (trivalent nitrogen), -N(H)-, and >N-oxide, and the remaining ring atoms being carbon, wherein the ring comprising a monocyclic radical is aromatic and wherein at least one of the fused rings comprising a bicyclic or tricyclic radical is aromatic (but does not have to be a ring which contains a heteroatom, e.g. 2,3-dihydrobenzo[b][1,4]dioxin-6-yl). Fused bicyclic radical includes bridged ring systems. Unless stated otherwise, the valency may be located on any atom of any ring of the heteroaryl group, valency rules permitting.

[0522] In certain embodiments, heteroaryl includes, but is not limited to, triazolyl, tetrazolyl, pyrrolyl, imidazolyl, thienyl, furanyl, pyrazolyl, oxazolyl, isoxazolyl, oxadiazolyl, thiadiazolyl, indolyl, indazolyl, phthalimidyl, benzimidazolyl, benzoxazolyl, benzofuranyl, benzothienyl, benzopyranyl, benzothiazolyl, pyridinyl, pyrazinyl, pyrimidinyl, pyridazinyl, quinolinyl, isoquinolinyl, and tetrahydroisoquinolinyl.

[0523] “Heterocycloalkyl” means a saturated or partially unsaturated (but not aromatic) monovalent monocyclic group of 3 to 9 ring atoms or a saturated or partially unsaturated (but not aromatic) monovalent bicyclic group of 5 to 12 ring atoms in which one or more ring atoms is a heteroatom independently selected from -O-, -S(O)ₙ- (n is 0, 1, or 2), -N= (trivalent nitrogen), or -NH-, and the remaining ring atoms are carbon. Heterocycloalkyl groups include fused, bridged and spiro heterocycloalkyl bicyclic rings. For example, when fused, the heterocycloalkyl group may comprise two rings that share adjacent atoms (e.g., one covalent bond). When bridged, the heterocycloalkyl group may comprise two rings that share three or more atoms, separating the two bridgehead atoms by a bridge containing at least one atom. When spiro, the heterocycloalkyl group may comprise two rings that share only one single atom, the spiro atom, which may be, for example, a quaternary carbon. In certain embodiments, the heterocycloalkyl group comprises one, two, three, or four ring heteroatoms, independently selected from -O-, -S(O)ₙ- (n is 0, 1, or 2), -N= (trivalent nitrogen), or -NH-.

[0524] In certain embodiments, the heterocycloalkyl group contains from 5 or 6 ring atoms. In certain embodiments, heterocycloalkyl includes, but is not limited to, azetidinyl, pyrrolidinyl, piperidinyl, morpholinyl, piperazinyl, pyranyl, tetrahydropyranyl, tetrahydrothiopyranyl, dioxinyl, thiomorpholinyl, pyrazolidinyl, imidazolinyl, imidazolidinyl, oxazolinyl, oxazolidinyl, isoxazolidinyl, thiazolinyl, thiazolidinyl, and tetrahydrofuryl.

[0525] In the context of this invention, a decrease or increase of a parameter to be assessed means a change of at least 5% of the value corresponding to that parameter. More preferably, a decrease or increase of the value means a change of at least 10%, even more preferably at least 20%, at least 30%, at least 40%, at least 50%, at least 70%, at least 90%, or 100%. In this latter case, it can be the case that there is no longer a detectable value associated with the parameter.

[0526] The use of a substance as a medicament as described in this document can also be interpreted as the use of said substance in the manufacture of a medicament. Similarly, whenever a substance is used for treatment or as a medicament, it can also be used for the manufacture of a medicament for treatment.

[0527] The word “about” or “approximately” when used in association with a numerical value (e.g. about 10) preferably means that the value may be the given value (of 10) more or less 0.1% of the value.

[0528] Compounds or compositions according to this invention are preferably for use in methods or uses according to this invention.

[0529] As will be understood by a skilled person, throughout this application, the terms “BNA”, “BNA scaffold”, “BNA nucleotide”, “BNA nucleoside”, “BNA modification”, or “BNA scaffold modification” may be replaced by conformationally restricted scaffold modification, locked scaffold modification, locked nucleotide, locked nucleoside, locked monomer, or Tm enhancing scaffold modification, or high-affinity modification and the like, as appropriately.

[0530] The following examples are offered for illustrative purposes only, and are not intended to limit the scope of the present invention in any way.

### Examples

### Example 1 (In Vitro)

### Material and Methods

### Aons

[0531] Antisense oligonucleotides (AONs) (Table 1, FIGS. 1A-3) had a phosphorothioate backbone with 2′-O-methyl monomers and either LNA (SEQ ID NO:452, 453, 455, and 456), or 2′-amino-LNA (SEQ ID NO:456A), or CRN (SEQ ID NO:453C and 455C) scaffold modification. The AON with SEQ ID NO:452 featured cytosines, the other SEQ ID NOs featured 5-methylcytosines. 2′ -amino-LNA refers to the scaffold modification that is also sometimes named 2′-amino-2′-deoxy LNA The AONs were synthesized in 10 µmol scale using an OP-10 synthesizer (GE/ÄKTA Oligopilot), through standard phosphoramidite protocols. The AONs were cleaved and deprotected in a two-step sequence (diethylamine followed by conc. NH₄OH treatment), purified by HPLC and dissolved in water and an excess of NaCl was added to exchange ions. After evaporation, the AONs were redissolved in water, desalted by FPLC and lyophilized. Mass spectrometry confirmed the identity of all AONs, and purity (determined by UPLC) was found acceptable for all AONs (>80%).

TABLE 1

| AON ID | Chemical Modification | Sequence | Length | SEQ ID NO |
|---|---|---|---|---|
| NO:452 | 2OMe/PS | UCAAGGAAGAUGGCAUUUCU | 20 | 452 |
| NO:453(C) | 2OMe/BNA/PS | TCAAGGAAGAUGGCAUUUCU | 20 | 453 |
| NO:455(C) | 2OMe/BNA/PS | TCAAGGAAGAUGGCAUUUCT | 20 | 455 |
| NO:456 (A) | 2OMe/BNA/PS | TC AAGGAAGAUGGCAUUUCU | 20 | 456 |

A=adenosine, G=guanine, U=uracil, T=thymine, C=cytosine, C=5-methylcytosine, and T=BNA nucleotide; 2OMe details that the AON comprises 2′-O-methyl substitutions in all non-BNA monomers; PS details that the AON exclusively comprises phosphorothioate backbone linkages

### Gymnotic Uptake and CDNA Synthesis

[0532] Immortalized myoblasts, derived from a DMD patient with a deletion of exons 48-50 (Δ48-50), were cultured to confluency in 6-wells plates. To induce the formation of myotubes, proliferation medium was replaced by low-serum differentiation medium for 5 days, supplemented with 800 nM or 4 µM of AON (in triplicate) according to non-GLP standard operating procedures. Total RNA was then isolated and 1000 ng of RNA was used as input for the cDNA synthesis using random hexamer primers.

### Digital Droplet (DD)PCR Analysis

[0533] Specific Taqman minor groove binder (MGB) assays were designed to detect the dystrophin transcript products with and without exon 51 (Table 2) and were purchased from Applied Biosystems. Digital droplet PCR analysis was performed on 1 µl (for non-skipped transcript) or 4 µl (for skipped transcript) of cDNA in a 20 µl reaction volume using an annealing/extension temperature of 60° C. according to the manufacturer’s instructions (BioRad). Data was presented as percentage exon skip [N₀skipped/(No skipped + N₀non-skipped)*100].

TABLE 2

| Assay | Target Exons | | Sequences | Amplicon length | SEQ ID NO |
|---|---|---|---|---|---|
| DMD_47-52 | 47/52 | Forward primer | TGAAAATAAGCT CAAGCAGACAAA TC | 71 | 1586 |
| | | Reverse primer | GACGCCTCTGTTC CAAATCC | | 1587 |
| | | Probe | CAGTGGATAAAG GCAACA | | 1588 |
| DMD_51-52.2 | 51/52 | Forward primer | GTGATGGTGGGT GACCTTGAG | 82 | 1589 |
| | | Reverse primer | GACGCCTCTGTTC CAAATCC | | 1590 |
| | | Probe sequence | CAAGCAGAAGGC AACAA | | 1591 |

### Simple Western Capillary Immunoassay

[0534] Total protein was extracted in protein loading buffer (6% 1.25 M Tris-HCl pH 6.8, 20% glycerol, 15% SDS, 0.0016% bromophenol blue, 5% β-mercaptoethanol (all Sigma) with protease inhibitor (Roche)). Protein concentration was measured using a Compat-Able Protein Assay Preparation Reagent Set (Thermo scientific) and a Pierce BCA Protein Assay Kit (Thermo scientific). For the healthy human control cell sample 50, 5 or 0.5 µg/mL was applied, for the DMD patient cell samples 100, 50, or 10 µg/mL. Dystrophin protein levels were quantified using Simple Western Capillary Immunoassay (Protein Simple) and WES 66-440 kDa Rabbit Master Kit (Protein Simple cat. # PSMK20) according to manufacturer’s protocols. The WES plate was loaded with biotinylated ladder, samples, primary rabbit polyclonal anti-dystrophin antibody (Abcam, cat.# ab15277, 1:50 diluted in supplied antibody diluent), streptavidin-HRP for ladder detection, secondary anti-rabbit antibody, luminol-peroxide mix and wash buffer (all supplied in the WES master kit). The plate was centrifuged for 5 minutes at 2500 rpm at room temperature and loaded in the WES equipment together with the corresponding capillary cartridge. After running the assay, data was analyzed using Compass software.

### Results

[0535] Implementation of at least one 5′ and/or 3′ BNA scaffold-modified nucleotide in an AON improves exon 51 skipping levels when compared to an iso-sequential AON without BNA scaffold-modified nucleotide (based on SEQ ID NO:452). FIG. 1A shows this effect for three AONs (SEQ ID NO: 453, NO:455, and NO:456) at low (800 nM) and high (4 µM) concentration in DMD patient muscle cells in vitro. The BNA scaffold modification in this case is LNA. Compared to the AON without BNA scaffold modifications based on SEQ ID NO:452, the AONs with LNA nucleotides induced 4- to 8-fold higher exon 51 skipping levels. This was associated with an even higher improvement in dystrophin levels (up to 20-fold with SEQ ID NO:456) (FIG. 1B). A similar effect was obtained with implementation of a 5′ and/or 3′ CRN scaffold-modified (SEQ ID NO: 453C and 455C) or 2′-amino-LNA scaffold-modified (SEQ ID NO: 456A) nucleotide when compared to the AON without BNA scaffold modifications based on SEQ ID NO:452 at 800 nM and/or 4 µM (FIG. 2A, FIG. 2B).

### Example 2 (In Vivo)

### Material and Methods

### Aons

[0536] Antisense oligonucleotides (AONs) (Table 1, FIG. 3) had a full phosphorothioate backbone with 2′-O-methyl substitutions in all non-BNA monomers, 5-methylcytosines and BNA scaffold modifications resulting in LNA monomers (SEQ ID NOs: 453, 455, and 456). The control AON with SEQ ID NO: 452 had a phosphorothioate backbone with 2′-O-methyl monomers, cytosines, and no BNA scaffold modifications. The AONs were synthesized on a 1 mmol scale using an OP-100 synthesizer (GE/ÄKTA Oligopilot), through standard phosphoramidite protocols. The AONs were cleaved and deprotected in a two-step sequence (diethylamine followed by conc. NH₄OH treatment), purified by anion-exchange chromatography, desalted by ultrafiltration/diafiltration, and lyophilized. Mass spectrometry confirmed the identity of all AONs, and purity (determined by UPLC) was found acceptable for all AONs (>85%).

### Mouse Experiment

[0537] This mouse experiment was carried out according to the National Institute of Health (NIH) guidelines for the care and use of laboratory animals hDMD mice were bred and genotyped by JAX Labs (USA). Mice were randomized into groups (n=15) taking into account baseline weight and male-female distribution. Mice received 1× weekly an intravenous tail vein injection with 100 mg/kg of each of the AONs with SEQ ID NO: 452, 453, 455, or 456, and starting at 5-6 weeks of age for a total of 12 weeks (SEQ ID NO: 452 does not comprise any BNA scaffold modifications in this case). Four days after the last AON injection the animals were sacrificed and tissue samples collected (after transcardial perfusion with PBS in order to remove blood from the tissues). Muscle tissues samples were snap frozen and stored at -80° C.

### Rna Isolation and CDNA Synthesis

[0538] Tissues were homogenized in 1 ml RNA-Bee (Bio-Connect) by grinding in a MagNa Lyser using MagNA Lyser Green Beads (Roche). Total RNA was extracted from the homogenate based on the manufacturer’s instructions. For cDNA synthesis 1000 ng of total RNA was used as input. cDNA was generated in 20 µl reactions using random hexamer primers and Transcriptor Reverse transcriptase according to the manufacturer’s instructions (Roche), with the exception that incubation took place for 40 minutes at 50° C. instead of 30 minutes at 55° C.

### Digital Droplet Pcr Analysis

[0539] Specific Taqman minor groove binder (MGB) assays were designed (using Primer Express 3.0.1 software; Applied Biosystems) to detect the dystrophin transcript products with and without exon 51 (Table 2) and purchased from Applied Biosystems. Digital droplet PCR analysis was performed on 2 or 4 µl of cDNA in a 20 µl reaction volume using an annealing/extension temperature of 60° C. according to the manufacturer’s instructions (BioRad). Data was presented as percentage exon skip [N₀skipped/(N₀skipped + N₀non-skipped)*100].

### Results

[0540] Transgenic hDMD mice expressing full length human dystrophin allow in vivo screening of human-specific AONs in a mouse experimental background. Note that this model is not dystrophin-deficient and has no muscle pathology. Therefore the uptake of AONs by muscle tissue is typically lower than that in the mdx mouse model. In this experiment, three AONs with 5′ and/or 3′ BNA-scaffold modified nucleotides (SEQ ID NO: 453, 455, and 456, using LNA scaffold modifications) were compared to the iso-sequential AON without BNA scaffold modified nucleotides (SEQ ID NO:452) in a 12 wks systemic (IV) hDMD study. FIG. 3 shows improved in vivo exon 51 skipping levels for all LNA-containing AONs, up to 8-fold with AON of SEQ ID NO:455 when compared to AON of SEQ ID NO:452.

### Example 3 (In Vitro)

### Aons

[0541] The antisense oligonucleotides (AONs) of the invention (Table 3, FIG. 4) comprised a full phosphorothioate backbone with 2′-O-methyl substitutions in all non-BNA monomers, 5-methylcytosines, and at least one BNA scaffold modification resulting in an LNA monomer (SEQ ID NOs: 455, 459, 4528, 4531, 4532, 4533, 4535, 4542, 4548, and 4568). The control AON with SEQ ID NO: 452 comprised a phosphorothioate backbone with 2′-O-methyl monomers, cytosines and no BNA scaffold modifications. The AONs were synthesized in 5 µmol scale using an OP-10 synthesizer (GE/ÄKTA Oligopilot), through standard phosphoramidite protocols. The AONs were cleaved and deprotected in a two-step sequence (DEA followed by conc. NH₄OH treatment), purified by anion-exchange chromatography, desalted by size exclusion chromatography and lyophilized. Mass spectrometry confirmed the identity of all AONs, and purity (determined by UPLC) was found acceptable for all AONs (>80%).

TABLE 3

| SEQ ID NO: | Chemical Modification | Sequence |
|---|---|---|
| 452 | 2OMe/PS | UCAAGGAAGAUGGCAUUUCU |
| 455 | 2OMe/PS/LNA | TCAAGGAAGAUGGCAUUUCT |
| 459 | 2OMe/PS/LNA | TCAAGGAAGAUGGCAUUUCUAG |
| 4528 | 2OMe/PS/LNA | TCAAGGAAGAUGGCAUUUCUAG |
| 4531 | 2OMe/PS/LNA | TCAAGGAAGAUGGCAUUUCUAG |
| 4532 | 2OMe/PS/LNA | TCAAGGAAGAUGGCAUUUCUAG |
| 4533 | 2OMe/PS/LNA | TCAAGGAAGAUGGCAUUUCUAG |
| 4535 | 2OMe/PS/LNA | TCAAGGAAGAUGGCAUUUCT |
| 4542 | 2OMe/PS/LNA | TCAAGGAAGAUGGCAUUUCT |
| 4548 | 2OMe/PS/LNA | CAAGGAAGAUGGCAUUUCT |
| 4568 | 2OMe/PS/LNA | GGUAAGUUCUGUCCAAGC |

A=adenosine, G=guanine, U=uracil, T=thymine, C=cytosine, C=5-methylcytosine, and T=LNA nucleotide; 2OMe details that the AON comprises 2′-O-methyl substitutions in all non-BNA monomers; PS details that the AON exclusively comprises phosphorothioate backbone linkages

### Gymnotic Uptake and Cdna Synthesis

[0542] Immortalized myoblasts, derived from a DMD patient with a deletion of exons 48-50 (Δ48-50), were cultured to confluency in 6-wells plates. To induce the formation of myotubes, proliferation medium was replaced by low-serum differentiation medium for 7 days, supplemented with 800 nM AON (in triplicate) according to non-GLP standard operating procedures. Total RNA was then isolated and 1000 ng of RNA was used as input for the cDNA synthesis using random hexamer primers.

### Digital Droplet (dd)pcr Analysis

[0543] Specific Taqman minor groove binder (MGB) assays were designed to detect the dystrophin transcript products with and without exon 51 (Table 2) and were purchased from Applied Biosystems. Digital droplet PCR analysis was performed on 1 µl (for transcript without exon skip) or 4 µl (for transcript with exon skip) of cDNA in a 20 µl reaction volume using an annealing/extension temperature of 60° C. according to the manufacturer’s instructions (BioRad). Data was presented as percentage exon skip [N₀skipped/(N₀skipped + N₀non-skipped)*100].

### Results

[0544] Implementation of at least one BNA scaffold-modified nucleotide (resulting in an LNA monomer) in an AON improves exon 51 skipping levels when compared to an iso-sequential AON without a BNA scaffold modification (based on SEQ ID NO: 452). FIG. 4 shows this effect for ten AONs (SEQ ID NOs: 455, 459, 4528, 4531, 4532, 4533, 4535, 4542, 4548, and 4568) at 800 nM concentration in DMD patient muscle cells in vitro. Compared to the AON without a BNA scaffold modification (SEQ ID NO: 452), the AONs with LNA nucleotides induced 10- to 40-fold higher exon 51 skipping levels.

### Example 4 (In Vitro)

### Material and Methods

### Aons

[0545] The antisense oligonucleotides (AONs) of the invention (Table 4, FIGS. 5A-C) comprised a full phosphorothioate backbone with 2′-O-methyl substitutions, 5-methylcytosines, and at least one BNA scaffold modification resulting in an LNA monomer (SEQ ID NOs: 29, 3185, and 863). The control AONs comprised a full phosphorothioate backbone with only 2′-O-methyl substituted monomers, 5-methylcytosines, but no BNA scaffold modification (SEQ ID NO: 26, 6049, and 860; for SEQ ID NO: 6049, these modifications make it identical to SEQ ID NO: 6071). The AONs were synthesized in 5 µmol scale using an OP-10 synthesizer (GE/ÄKTA Oligopilot), through standard phosphoramidite protocols. The AONs were cleaved and deprotected in a two-step sequence (DEA followed by conc. NH₄OH treatment), purified by anion-exchange chromatography, desalted by size exclusion chromatography and lyophilized. Mass spectrometry confirmed the identity of all AONs, and purity (determined by UPLC) was found acceptable for all AONs (>80%).

TABLE 4

| SEQ ID NO: | Chemical Modification | Sequence |
|---|---|---|
| 26 | 2OMe/PS | UCAGCUUCUGUUAGCCACUG |
| 29 | 2OMe/PS/LNA | TCAGCUUCUGUUAGCCACUG |
| 6049 | 2OMe/PS | UUUGCCGCUGCCCAAUGCCAUCCUG |
| 3185 | 2OMe/PS/LNA | TUUGCCGCUGCCCAAUGCCAUCCUG |
| 860 | 2OMe/PS | GUUGCCUCCGGUUCUGAAGGUGUUC |
| 863 | 2OMe/PS/LNA | GUUGCCUCCGGUUCUGAAGGUGUUC |

A=adenosine, G=guanine, U=uracil, T=thymine, C=5-methylcytosine, and T=LNA nucleotide; 2OMe details that the AON comprises 2′-O-methyl substitutions in all non-BNA monomers; PS details that the AON exclusively comprises phosphorothioate backbone linkages

### Gymnotic Uptake and Cdna Synthesis

[0546] Immortalized myoblasts, derived from a healthy donor, were cultured to confluency in 12-wells plates. To induce the formation of myotubes, proliferation medium was replaced by low-serum differentiation medium for 7 days, supplemented with 800 nM or 4 µM of AON (n=6) according to non-GLP standard operating procedures. Total RNA was then isolated and 1000 ng of RNA was used as input for the cDNA synthesis using random hexamer primers.

### Digital Droplet (dd)pcr Analysis

[0547] Specific Taqman minor groove binder (MGB) assays were designed to detect the dystrophin transcript products with and without exon 44, 45, or 53 (Table 5) and were purchased from Applied Biosystems. Digital droplet PCR analysis was performed on 1 µl (for transcript without exon skip) or 4 µl (for transcript with exon skip) of cDNA in a 20 µl reaction volume using an annealing/extension temperature of 60° C. according to the manufacturer’s instructions (BioRad). Data was presented as percentage exon skip [N₀ skipped/(N₀skipped + N₀non-skipped)*100].

TABLE 5

| Assay | | Primer/Probe Sequences (5′-3′) | Amplicon length | SEQ ID NO: |
|---|---|---|---|---|
| DMD 43-45 | Forward | CCCAGCTTGATTTCCAATGG | 83 | 6050 |
| | Reverse | GCCGCTGCCCAATGC | | 6051 |
| | Probe | ACCGACAAGGGAACTC | | 6052 |
| DMD 44-45 | Forward | TGGGAACATGCTAAATACAAAT GG | 62 | 6053 |
| | Reverse | TGCCGCTGCCCAATG | | 6054 |
| | Probe | ATCTTAAGGAACTCCAGGATG | | 6055 |
| DMD 44-46.2 | Forward | GAGAATTGGGAACATGCTAAAT ACAA | 110 | 6056 |
| | Reverse | CCTCCAACCATAAAACAAATTC ATT | | 6057 |
| | Probe | TATCTTAAGGCTAGAAGAACAA | | 6058 |
| DMD 52-54 | Forward | CCAGCAATCAAGAGGCTAGAAC A | 92 | 6059 |
| | Reverse | TCATTTGCCACATCTACATTTGT CT | | 6060 |
| | Probe | ATTACGGATCGAACAGTTG | | 6061 |
| DMD 53-54 | Forward | GTCCCTATACAGTAGATGCAAT CCAA | 75 | 6062 |
| | Reverse | GCCACTGGCGGAGGTCTT | | 6063 |
| | Probe | ACAGAAACCAAGCAGTTG | | 6064 |

### Results

[0548] Implementation of BNA scaffold modifications resulting in LNA monomers at both the 5′ and 3′ end of AONs targeting DMD exon 44, exon 45, or exon 53, improved exon skipping levels in healthy human control myotubes in vitro 2- to 3-fold when compared to iso-sequential AONs without BNA scaffold-modifications. FIGS. 5A-C shows this effect for three AONs (SEQ ID NO: 29 (targeting exon 44), SEQ ID NO: 3185 (targeting exon45), and SEQ ID NO:863 (targeting exon 53), at low (800 nM) and high (4 µM) concentrations. Note that exon skip levels in healthy human myotubes are typically lower than those obtained in DMD patient muscle cells (as used in Example 1). This is explained by the nonsense-mediated decay of out-of-frame transcripts resulting from AON-induced exon skipping in healthy muscle cells.

### List of References

[0549] Dominski and Kole, PNAS 1993, 90(18):8673-8677
[0550] Friedman et al., J Biol Chem 1999, 274(51):36193-36199
[0551] Uchikawa et al., J Hum Genet 2007, 52(11):891-897
[0552] Williams et al., Oligonucleotides 2006, 16(2):186-95
[0553] Vickers et al., J Immunol 2006, 176(6):3652-61
[0554] Karras et al., Biochemistry 2001, 40(26):7853-9
[0555] Vetrini et al., Hum Mutat 2006, 27(5):420-6
[0556] Du et al., PNAS 2007, 104(14):6007-12
[0557] Rincon et al., Am J Hum Genet 2007, 81(6):1262-1270
[0558] Tyson-Capper et al., Mol Pharmacol 2006, 69(3):796-804
[0559] Khoo et al., BMC Mol Biol 2007, 8;3
[0560] Renshaw et al., Mol Cancer Ther 2004, 3(11):1467-84
[0561] Giles et al., Antisense Nucleic Acid Drug Dev 1999, 9(2):213-20
[0562] Goto et al., J Invest Dermatol 2006, 126(12):2614-20
[0563] Disterer et al., Mol Ther 2013, 21(3):602-609
[0564] Uehara et al., FASEB J 2013, 27(1):76-85
[0565] Gedicke-Hornung et al., EMBO Mol Med 2013, 5(7):1060-77
[0566] Lentz et al., Nat Med 2013, 19(3):345-350
[0567] Taniguchi-Ikeda et al., Nature 2011, 478(7367):127-31
[0568] Owen et al., PLoS One 2012, 7(3):e33576
[0569] Zammarchi et al., PNAS 2011, 108(43):17779-84
[0570] Mercatante et al., J Biol Chem 2002, 277(51):49374-82
[0571] Osorio et al., Sci Transl Med 2011, 3(106):106ra107
[0572] Wein et al., Hum Mut 2010, 31(2):136-42
[0573] Gao et al., Cell Transplant 2008, 17(7):723-34
[0574] Peacey et al., NAR 2012, 40(19):9836-49
[0575] Wheeler et al., J Clin Invest 2007, 117(12):3952-7
[0576] Evers et al., Nucleic Acid Ther 2014, 24(1):4-12
[0577] van Ommen, van Deutekom, Aartsma-Rus, Curr Opin Mol Ther. 2008; 10(2):140-9.
[0578] Yokota, Duddy, Partidge, Acta Myol. 2007; 26(3):179-84.
[0579] van Deutekom et al., N Engl J Med. 2007; 357(26):2677-86.
[0580] Goemans et al., N Engl J Med. 2011; 364(16):1513-22.
[0581] Cirak et al., Lancet 2011; 378: 595-605.
[0582] Voit et al., Lancet Neurol 2014, 13(10):987-96
[0583] Heemskerk et al., Mol Ther 2010; 18(6):1210-7.
[0584] Evers et al. PLoS ONE 2011, 6 (9) e24308
[0585] Gao et al., Mol Ther Nucleic Acids 2015, 4:e255
[0586] Goyenvalle et al., Nat Med 2015, 21(3):270-5
[0587] Khoo and Krainer, Curr Opin Mol Ther 2009, 11(2):108-15
[0588] Singh et al., Mol Cell Biol 2006, 26(4):1333-46
[0589] Hua et al., Am J Hum Genet 2008, 82(4): 834-48
[0590] Hua et al., Genes Dev 2010, 24(15):1634-44
[0591] Hua et al., Nature 2011, 478(7367):123-6
[0592] Passini et al., Sci Transl Med 2011, 3(72):72ra18
[0593] Swoboda et al., J Clin Invest 2014, 124(2): 487-90
[0594] Chiriboga et al., Neurology 2016, 86(10):890-7
[0595] Braida C., et al, Human Molecular Genetics, 2010, vol 9: 1399-1412
[0596] Aartsma-Rus et al., Hum Mol Gen 2003; 12(8):907-14.
[0597] Yu RZ., Anal Biochem 2002; 304: 19-25.
[0598] Dorn and Kippenberger, Curr Opin Mol Ther 2008; 10(1): 10-20
[0599] Krieg AM. et al., Nature 1995; 374: 546-549.
[0600] Krieg, A. M., Curr. Opin. Immunol. 2000; 12: 35-43.
[0601] Han et al., Nature Communications, 2016, doi:10.1038/ncomms10981
[0602] Wagner, H., Adv. Immunol. 1999; 73: 329-368.
[0603] Popovic PJ. et al. J of Immunol 2006; 177: 8701-8707.
[0604] Diebold S.S., et.al., Eur J Immunol. 2006; Dec;36(12):3256-67.
[0605] Peacock H et al. J. Am. Chem. Soc. 2011, 133, 9200
[0606] Arai K et al.Bioorg. Med. Chem. 2011, 21, 6285
[0607] Ehmsen J. et al, J. Cell Sci. 2002, 115 (Pt14): 2801-2803.
[0608] Monaco A.P., et al., Genomics 1988; 2: 90-95.
[0609] Manzur A.Y. et al., Wiley publishers, 2008. The Cochrane collaboration.
[0610] Hodgetts S., et al, Neuromuscular Disorders 2006; 16: 591-602.
[0611] Zuker M., et al, Nucleic Acids Res. 2003; 31(13):3406-15.
[0612] Cartegni L, et al, Nat Rev Genet 2002;3(4):285-98.
[0613] Cartegni L, et al, Nucleic Acids Res 2003;31(13):3568-71
[0614] Remington: The Science and Practice of Pharmacy, 20th Edition.
[0615] Baltimore, MD: Lippincott Williams & Wilkins, 2000
[0616] Kumar L, Pharm. Technol. 2008, 3, 128
[0617] Bruno, K., Advanced Drug Delivery Reviews 2011; 63: 1210.
[0618] doi: 10.1021/ja710342q
[0619] Seth et al., J. Org. Chem. 2010, 75, 1569-1581
[0620] doi: 10.1093/nass/1.1.241
[0621] doi: 10.1021/jo100170g
[0622] Osawa et al., J. Org. Chem., 2015, 80 (21), pp 10474-10481
[0623] WO 2014/145356 (MiRagen Therapeutics)
[0624] WO 2014/126229 (Mitsuoka Y et al.)
[0625] Yamamoto et al. Org. Biomol. Chem. 2015, 13, 3757
[0626] Nishida et al. Chem. Commun. 2010, 46, 5283
[0627] WO 2014/112463 (Obika S et al.)
[0628] WO 2015/142910 (Ionis Pharmaceuticals)
[0629] Hanessian et al., J. Org. Chem., 2013, 78 (18), pp 9064-9075
[0630] Bolli et al., Chem Biol. 1996 Mar;3(3):197-206
[0631] DOI: 10.1021/jo402690j
[0632] Murray et al., Nucl. Acids Res., 2012, Vol. 40, No. 13 6135-6143
[0633] doi: 10.1021/acs.joc.5b00184
[0634] Nucleic Acids Res. 2004, 32, 5791-5799
[0635] WO2011/097641 (ISIS/Ionis Pharmaceuticals)
[0636] WO2016/017422 (Osaka University)
[0637] Cao et al., Mol. Ther. Nucleic Acids, 2016, doi:10.1038/mtna.2016.46
[0638] Spitali et al., FASEB J 2013, 27(12): 4909-4916
[0639] Horiba et al., J. Org. Chem. 2016, doi: 10.1021/acs.joc.6b02036
[0640] Shrestha et al., Chem. Commun. 2014, doi: 10.1039/C3CC46017G
[0641] WO2017/062862 (WaVe Life Sciences)
[0642] WO2016/028187 (Noogen)
[0643] Jirka et al., Nucl. Acid Ther. 2014, 24, 25
[0644] WO2013/030569
[0645] US9,161,948 (Sarepta)
[0646] WO2016/187425 (Sarepta)
[0647] Gao et al., Mol. Ther. 2014, 22, 1333
[0648] Shabanpoor et al., Nucl. Acids Ther. 2017, 27, 130
[0649] WO2017/062862 (Wave Life Sciences)
[0650] Ferrés-Coy et al. Mol. Psych. 2016, 21, 328
[0651] US 6,656,730 (ISIS/Ionis Pharmaceuticals)
[0652] Noir et al., J. Am. Chem Soc. 2008, 130, 13500
[0653] Nakagawa et al., J. Am. Chem. Soc. 2010, 132, 8848
[0654] Dohmen et al., Mol. Ther. Nucl. Acids 2012, 1, e7
[0655] Zhao et al. Biomaterials 2015, 67, 42
[0656] WO2016/179257 (CytoMx)
[0657] Sugo et al., J. Control. Rel. 2016, 237, 1
[0658] Weisbart et al., Mol. Cancer Ther. 2012, 11, 1
[0659] Winkler et al., Ther. Deliv. 2013, 4, 791
[0660] Manoharan, Antisense Nucl. Acid. Dev. 2004, 12, 103
[0661] Ming et al., Adv. Drug Deliv. Rev. 2015, 87, 81

What is claimed is:

1. An antisense oligonucleotide comprising the base sequence of any one of SEQ ID NOs: 8-452, 458, 464, 470, 476, 482, 488, 494, 500, 506, 512, 518, 524, 530, 536, 542, 548-1399, 1608-4529, 4561-6049, 6071, 6073-6084 and 6086-6092, wherein the antisense oligonucleotide has a fully phosphorothioate backbone, wherein the antisense oligonucleotide contains at least one 5-methylcytosine or 5-methyluracil base, and wherein the antisense oligonucleotide contains at least one BNA monomer.

2. The antisense oligonucleotide of claim 1, comprising the base sequence of any one of SEQ ID NOs: 452, 458, 464, 470, 476, 482, 488, 494, 500, 506, 512, 518, 524, 530, 536, 542, 548-613, 4561-4572, 6073 and 6086.

3. The antisense oligonucleotide of claim 2, wherein all cytosines are replaced by 5-methylcytosine.

4. The antisense oligonucleotide of claim 3, wherein the oligonucleotide has a length of 18, 19, 20, 21, or 22 nucleotides.

5. The antisense oligonucleotide of claim 4, wherein the oligonucleotide has a length of 18, 20, or 22 nucleotides.

6. The antisense oligonucleotide of claim 5, wherein said oligonucleotide comprises 1, 2, 3, or 4 LNA monomers.

7. The antisense oligonucleotide of claim 6, wherein the 5′-terminal position of the oligonucleotide is an LNA monomer.

8. The antisense oligonucleotide of claim 6, wherein the 3′-terminal position of the oligonucleotide is an LNA monomer.

9. The antisense oligonucleotide of claim 6, wherein the two monomers closest to the 5′-position of the oligonucleotide are LNA monomers.

10. The antisense oligonucleotide of claim 9 comprising the base sequence of any one of SEQ ID NOs: 591-601, 4565-4571, 6073 or 6086.

11. The antisense oligonucleotide of claim 10 comprising the base sequence of SEQ ID NO: 4568.

12. The antisense oligonucleotide of claim 1 comprising the base sequence GGUAAGUUCUGUCCAAGC, wherein C=5-methylcytosine, C=5-methylcytosinse LNA nucleotide and G=guanine LNA nucleotide.

13. A pharmaceutical composition, comprising the antisense oligonucleotide of claim 1 and a pharmaceutically acceptable carrier.

14. A method of preventing, treating, and/or delaying the onset of Duchenne Muscular Dystrophy in a subject, comprising administering to the subject the antisense oligonucleotide of claim 1.

The application's sequence listing, which the Patent Office published only in electronic form, follows.

SEQUENCE LISTING (6089 sequences)

SEQ ID NO: 1 - protein, 3685 aa, Homo sapiens
MLWWEEVEDCYEREDVQKKTFTKWVNAQFSKFGKQHIENLFSDLQDGRRLLDLLEGLTGQKLPKEKGSTRVHALNNVNKALRVLQNNNVDLVNIGSTDIVDGNHKLTLGLIWNIILHWQVKNVMKNIMAGLQQTNSEKILLSWVRQSTRNYPQVNVINFTTSWSDGLALNALIHSHRPDLFDWNSVVCQQSATQRLEHAFNIARYQLGIEKLLDPEDVDTTYPDKKSILMYITSLFQVLPQQVSIEAIQEVEMLPRPPKVTKEEHFQLHHQMHYSQQITVSLAQGYERTSSPKPRFKSYAYTQAAYVTTSDPTRSPFPSQHLEAPEDKSFGSSLMESEVNLDRYQTALEEVLSWLLSAEDTLQAQGEISNDVEVVKDQFHTHEGYMMDLTAHQGRVGNILQLGSKLIGTGKLSEDEETEVQEQMNLLNSRWECLRVASMEKQSNLHRVLMDLQNQKLKELNDWLTKTEERTRKMEEEPLGPDLEDLKRQVQQHKVLQEDLEQEQVRVNSLTHMVVVVDESSGDHATAALEEQLKVLGDRWANICRWTEDRWVLLQDILLKWQRLTEEQCLFSAWLSEKEDAVNKIHTTGFKDQNEMLSSLQKLAVLKADLEKKKQSMGKLYSLKQDLLSTLKNKSVTQKTEAWLDNFARCWDNLVQKLEKSTAQISQAVTTTQPSLTQTTVMETVTTVTTREQILVKHAQEELPPPPPQKKRQITVDSEIRKRLDVDITELHSWITRSEAVLQSPEFAIFRKEGNFSDLKEKVNAIEREKAEKFRKLQDASRSAQALVEQMVNEGVNADSIKQASEQLNSRWIEFCQLLSERLNWLEYQNNIIAFYNQLQQLEQMTTTAENWLKIQPTTPSEPTAIKSQLKICKDEVNRLSGLQPQIERLKIQSIALKEKGQGPMFLDADFVAFTNHFKQVFSDVQAREKELQTIFDTLPPMRYQETMSAIRTWVQQSETKLSIPQLSVTDYEIMEQRLGELQALQSSLQEQQSGLYYLSTTVKEMSKKAPSEISRKYQSEFEEIEGRWKKLSSQLVEHCQKLEEQMNKLRKIQNHIQTLKKWMAEVDVFLKEEWPALGDSEILKKQLKQCRLLVSDIQTIQPSLNSVNEGGQKIKNEAEPEFASRLETELKELNTQWDHMCQQVYARKEALKGGLEKTVSLQKDLSEMHEWMTQAEEEYLERDFEYKTPDELQKAVEEMKRAKEEAQQKEAKVKLLTESVNSVIAQAPPVAQEALKKELETLTTNYQWLCTRLNGKCKTLEEVWACWHELLSYLEKANKWLNEVEFKLKTTENIPGGAEEISEVLDSLENLMRHSEDNPNQIRILAQTLTDGGVMDELINEELETFNSRWRELHEEAVRRQKLLEQSIQSAQETEKSLHLIQESLTFIDKQLAAYIADKVDAAQMPQEAQKIQSDLTSHEISLEEMKKHNQGKEAAQRVLSQIDVAQKKLQDVSMKFRLFQKPANFEQRLQESKMILDEVKMHLPALETKSVEQEVVQSQLNHCVNLYKSLSEVKSEVEMVIKTGRQIVQKKQTENPKELDERVTALKLHYNELGAKVTERKQQLEKCLKLSRKMRKEMNVLTEWLAATDMELTKRSAVEGMPSNLDSEVAWGKATQKEIEKQKVHLKSITEVGEALKTVLGKKETLVEDKLSLLNSNWIAVTSRAEEWLNLLLEYQKHMETFDQNVDHITKWIIQADTLLDESEKKKPQQKEDVLKRLKAELNDIRPKVDSTRDQAANLMANRGDHCRKLVEPQISELNHRFAAISHRIKTGKASIPLKELEQFNSDIQKLLEPLEAEIQQGVNLKEEDFNKDMNEDNEGTVKELLQRGDNLQQRITDERKREEIKIKQQLLQTKHNALKDLRSQRRKKALEISHQWYQYKRQADDLLKCLDDIEKKLASLPEPRDERKIKEIDRELQKKKEELNAVRRQAEGLSEDGAAMAVEPTQIQLSKRWREIESKFAQFRRLNFAQIHTVREETMMVMTEDMPLEISYVPSTYLTEITHVSQALLEVEQLLNAPDLCAKDFEDLFKQEESLKNIKDSLQQSSGRIDIIHSKKTAALQSATPVERVKLQEALSQLDFQWEKVNKMYKDRQGRFDRSVEKWRRFHYDIKIFNQWLTEAEQFLRKTQIPENWEHAKYKWYLKELQDGIGQRQTVVRTLNATGEEIIQQSSKTDASILQEKLGSLNLRWQEVCKQLSDRKKRLEEQKNILSEFQRDLNEFVLWLEEADNIASIPLEPGKEQQLKEKLEQVKLLVEELPLRQGILKQLNETGGPVLVSAPISPEEQDKLENKLKQTNLQWIKVSRALPEKQGEIEAQIKDLGQLEKKLEDLEEQLNHLLLWLSPIRNQLEIYNQPNQEGPFDVQETEIAVQAKQPDVEEILSKGQHLYKEKPATQPVKRKLEDLSSEWKAVNRLLQELRAKQPDLAPGLTTIGASPTQTVTLVTQPVVTKETAISKLEMPSSLMLEVPALADFNRAWTELTDWLSLLDQVIKSQRVMVGDLEDINEMIIKQKATMQDLEQRRPQLEELITAAQNLKNKTSNQEARTIITDRIERIQNQWDEVQEHLQNRRQQLNEMLKDSTQWLEAKEEAEQVLGQARAKLESWKEGPYTVDAIQKKITETKQLAKDLRQWQTNVDVANDLALKLLRDYSADDTRKVHMITENINASWRSIHKRVSEREAALEETHRLLQQFPLDLEKFLAWLTEAETTANVLQDATRKERLLEDSKGVKELMKQWQDLQGEIEAHTDVYHNLDENSQKILRSLEGSDDAVLLQRRLDNMNFKWSELRKKSLNIRSHLEASSDQWKRLHLSLQELLVWLQLKDDELSRQAPIGGDFPAVQKQNDVHRAFKRELKTKEPVIMSTLETVRIFLTEQPLEGLEKLYQEPRELPPEERAQNVTRLLRKQAEEVNTEWEKLNLHSADWQRKIDETLERLQELQEATDELDLKLRQAEVIKGSWQPVGDLLIDSLQDHLEKVKALRGEIAPLKENVSHVNDLARQLTTLGIQLSPYNLSTLEDLNTRWKLLQVAVEDRVRQLHEAHRDFGPASQHFLSTSVQGPWERAISPNKVPYYINHETQTTCWDHPKMTELYQSLADLNNVRFSAYRTAMKLRRLQKALCLDLLSLSAACDALDQHNLKQNDQPMDILQIINCLTTIYDRLEQEHNNLVNVPLCVDMCLNWLLNVYDTGRTGRIRVLSFKTGIISLCKAHLEDKYRYLFKQVASSTGFCDQRRLGLLLHDSIQIPRQLGEVASFGGSNIEPSVRSCFQFANNKPEIEAALFLDWMRLEPQSMVWLPVLHRVAAAETAKHQAKCNICKECPIIGFRYRSLKHFNYDICQSCFFSGRVAKGHKMHYPMVEYCTPTTSGEDVRDFAKVLKNKFRTKRYFAKHPRMGYLPVQTVLEGDNMETPVTLINFWPVDSAPASSPQLSHDDTHSRIEHYASRLAEMENSNGSYLNDSISPNESIDDEHLLIQHYCQSLNQDSPLSQPRSPAQILISLESEERGELERILADLEEENRNLQAEYDRLKQQHEHKGLSPLPSPPEMMPTSPQSPRDAELIAEAKLLRQHKGRLEARMQILEDHNKQLESQLHRLRQLLEQPQAEAKVNGTTVSSPSTSLQRSDSSQPMLLRVVGSQTSDSMGEEDLLSPPQDTSTGLEEVMEQLNNSFPSSRGRNTPGKPMREDTM

SEQ ID NO: 2 - RNA, 148 nt, synthetic construct
  misc_feature 1..148: note = DMD exon 44
  source 1..148: mol_type = other RNA
gcgatttgacagatctgttgagaaatggcggcgttttcattatgatataaagatatttaatcagtggctaacagaagctgaacagtttctcagaaagacacaaattcctgagaattgggaacatgctaaatacaaatggtatcttaag

SEQ ID NO: 3 - RNA, 176 nt, synthetic construct
  misc_feature 1..176: note = DMD exon 45
  source 1..176: mol_type = other RNA
gaactccaggatggcattgggcagcggcaaactgttgtcagaacattgaatgcaactggggaagaaataattcagcaatcctcaaaaacagatgccagtattctacaggaaaaattgggaagcctgaatctgcggtggcaggaggtctgcaaacagctgtcagacagaaaaaagag

SEQ ID NO: 4 - RNA, 233 nt, synthetic construct
  misc_feature 1..233: note = DMD exon 51
  source 1..233: mol_type = other RNA
ctcctactcagactgttactctggtgacacaacctgtggttactaaggaaactgccatctccaaactagaaatgccatcttccttgatgttggaggtacctgctctggcagatttcaaccgggcttggacagaacttaccgactggctttctctgcttgatcaagttataaaatcacagagggtgatggtgggtgaccttgaggatatcaacgagatgatcatcaagcagaag

SEQ ID NO: 5 - RNA, 118 nt, synthetic construct
  misc_feature 1..118: note = DMD exon 52
  source 1..118: mol_type = other RNA
gcaacaatgcaggatttggaacagaggcgtccccagttggaagaactcattaccgctgcccaaaatttgaaaaacaagaccagcaatcaagaggctagaacaatcattacggatcgaa

SEQ ID NO: 6 - RNA, 212 nt, synthetic construct
  misc_feature 1..212: note = DMD exon 53
  source 1..212: mol_type = other RNA
ttgaaagaattcagaatcagtgggatgaagtacaagaacaccttcagaaccggaggcaacagttgaatgaaatgttaaaggattcaacacaatggctggaagctaaggaagaagctgagcaggtcttaggacaggccagagccaagcttgagtcatggaaggagggtccctatacagtagatgcaatccaaaagaaaatcacagaaaccaag

SEQ ID NO: 7 - RNA, 190 nt, synthetic construct
  misc_feature 1..190: note = DMD exon 55
  source 1..190: mol_type = other RNA
ggtgagtgagcgagaggctgctttggaagaaactcatagattactgcaacagttccccctggacctggaaaagtttcttgcctggcttacagaagctgaaacaactgccaatgtcctacaggatgctacccgtaaggaaaggctcctagaagactccaagggagtaaaagagctgatgaaacaatggcaa

SEQ ID NO: 8 - RNA, 19 nt, synthetic construct
  misc_feature 1..19: note = Antisense oligonucleotide
  source 1..19: mol_type = other RNA
gccatttctcaacagatct

SEQ ID NO: 9 - RNA, 19 nt, synthetic construct
  misc_feature 1..19: note = Antisense oligonucleotide
  modified_base 1: mod_base = OTHER; note = misc_feature - bicyclic nucleic acid scaffold modification
  source 1..19: mol_type = other RNA
gccatttctcaacagatct

SEQ ID NO: 10 - RNA, 19 nt, synthetic construct
  modified_base 19: mod_base = OTHER; note = thymine
  misc_feature 1..19: note = Antisense oligonucleotide
  modified_base 19: mod_base = OTHER; note = misc_feature - bicyclic nucleic acid scaffold modification
  source 1..19: mol_type = other RNA
gccatttctcaacagatct

SEQ ID NO: 11 - RNA, 19 nt, synthetic construct
  modified_base 19: mod_base = OTHER; note = thymine
  misc_feature 1..19: note = Antisense oligonucleotide
  modified_base 1: mod_base = OTHER; note = misc_feature - bicyclic nucleic acid scaffold modification
  modified_base 19: mod_base = OTHER; note = misc_feature - bicyclic nucleic acid scaffold modification
  source 1..19: mol_type = other RNA
gccatttctcaacagatct

SEQ ID NO: 12 - RNA, 19 nt, synthetic construct
  misc_feature 1..19: note = Antisense oligonucleotide
  modified_base 1..2: mod_base = OTHER; note = misc_feature - bicyclic nucleic acid scaffold modification
  source 1..19: mol_type = other RNA
gccatttctcaacagatct

SEQ ID NO: 13 - RNA, 19 nt, synthetic construct
  modified_base 19: mod_base = OTHER; note = thymine
  misc_feature 1..19: note = Antisense oligonucleotide
  modified_base 18..19: mod_base = OTHER; note = misc_feature - bicyclic nucleic acid scaffold modification
  source 1..19: mol_type = other RNA
gccatttctcaacagatct

SEQ ID NO: 14 - RNA, 16 nt, synthetic construct
  misc_feature 1..16: note = Antisense oligonucleotide
  source 1..16: mol_type = other RNA
gccatttctcaacaga

SEQ ID NO: 15 - RNA, 16 nt, synthetic construct
  misc_feature 1..16: note = Antisense oligonucleotide
  modified_base 1: mod_base = OTHER; note = misc_feature - bicyclic nucleic acid scaffold modification
  source 1..16: mol_type = other RNA
gccatttctcaacaga

SEQ ID NO: 16 - RNA, 16 nt, synthetic construct
  misc_feature 1..16: note = Antisense oligonucleotide
  modified_base 16: mod_base = OTHER; note = misc_feature - bicyclic nucleic acid scaffold modification
  source 1..16: mol_type = other RNA
gccatttctcaacaga

SEQ ID NO: 17 - RNA, 16 nt, synthetic construct
  misc_feature 1..16: note = Antisense oligonucleotide
  modified_base 1: mod_base = OTHER; note = misc_feature - bicyclic nucleic acid scaffold modification
  modified_base 16: mod_base = OTHER; note = misc_feature - bicyclic nucleic acid scaffold modification
  source 1..16: mol_type = other RNA
gccatttctcaacaga

SEQ ID NO: 18 - RNA, 16 nt, synthetic construct
  misc_feature 1..16: note = Antisense oligonucleotide
  modified_base 1..2: mod_base = OTHER; note = misc_feature - bicyclic nucleic acid scaffold modification
  source 1..16: mol_type = other RNA
gccatttctcaacaga

SEQ ID NO: 19 - RNA, 16 nt, synthetic construct
  misc_feature 1..16: note = Antisense oligonucleotide
  modified_base 15..16: mod_base = OTHER; note = misc_feature - bicyclic nucleic acid scaffold modification
  source 1..16: mol_type = other RNA
gccatttctcaacaga

SEQ ID NO: 20 - RNA, 21 nt, synthetic construct
  misc_feature 1..21: note = Antisense oligonucleotide
  source 1..21: mol_type = other RNA
gccatttctcaacagatctgt

SEQ ID NO: 21 - RNA, 21 nt, synthetic construct
  misc_feature 1..21: note = Antisense oligonucleotide
  modified_base 1: mod_base = OTHER; note = misc_feature - bicyclic nucleic acid scaffold modification
  source 1..21: mol_type = other RNA
gccatttctcaacagatctgt

SEQ ID NO: 22 - RNA, 21 nt, synthetic construct
  modified_base 21: mod_base = OTHER; note = thymine
  misc_feature 1..21: note = Antisense oligonucleotide
  modified_base 21: mod_base = OTHER; note = misc_feature - bicyclic nucleic acid scaffold modification
  source 1..21: mol_type = other RNA
gccatttctcaacagatctgt

SEQ ID NO: 23 - RNA, 21 nt, synthetic construct
  modified_base 21: mod_base = OTHER; note = thymine
  misc_feature 1..21: note = Antisense oligonucleotide
  modified_base 1: mod_base = OTHER; note = misc_feature - bicyclic nucleic acid scaffold modification
  modified_base 21: mod_base = OTHER; note = misc_feature - bicyclic nucleic acid scaffold modification
  source 1..21: mol_type = other RNA
gccatttctcaacagatctgt

SEQ ID NO: 24 - RNA, 21 nt, synthetic construct
  misc_feature 1..21: note = Antisense oligonucleotide
  modified_base 1..2: mod_base = OTHER; note = misc_feature - bicyclic nucleic acid scaffold modification
  source 1..21: mol_type = other RNA
gccatttctcaacagatctgt

SEQ ID NO: 25 - RNA, 21 nt, synthetic construct
  modified_base 21: mod_base = OTHER; note = thymine
  misc_feature 1..21: note = Antisense oligonucleotide
  modified_base 20..21: mod_base = OTHER; note = misc_feature - bicyclic nucleic acid scaffold modification
  source 1..21: mol_type = other RNA
gccatttctcaacagatctgt

SEQ ID NO: 26 - RNA, 20 nt, synthetic construct
  misc_feature 1..20: note = Antisense oligonucleotide
  source 1..20: mol_type = other RNA
  modified_base 1: mod_base = OTHER; note = 2'-O-methyl uridine phosphorothioate
  modified_base 2: mod_base = OTHER; note = 5-methylcytosine phosphorothioate
  modified_base 3: mod_base = OTHER; note = 2'-O-methyl adenosine phosphorothioate
  modified_base 4: mod_base = OTHER; note = 2'-O-methyl guanosine phosphorothioate
  modified_base 5: mod_base = OTHER; note = 5-methylcytosine phosphorothioate
  modified_base 6: mod_base = OTHER; note = 2'-O-methyl uridine phosphorothioate
  modified_base 7: mod_base = OTHER; note = 2'-O-methyl uridine phosphorothioate
  modified_base 8: mod_base = OTHER; note = 5-methylcytosine phosphorothioate
  modified_base 9: mod_base = OTHER; note = 2'-O-methyl uridine phosphorothioate
  modified_base 10: mod_base = OTHER; note = 2'-O-methyl guanosine phosphorothioate
  modified_base 11: mod_base = OTHER; note = 2'-O-methyl uridine phosphorothioate
  modified_base 12: mod_base = OTHER; note = 2'-O-methyl uridine phosphorothioate
  modified_base 13: mod_base = OTHER; note = 2'-O-methyl adenosine phosphorothioate
  modified_base 14: mod_base = OTHER; note = 2'-O-methyl guanosine phosphorothioate
  modified_base 15: mod_base = OTHER; note = 5-methylcytosine phosphorothioate
  modified_base 16: mod_base = OTHER; note = 5-methylcytosine phosphorothioate
  modified_base 17: mod_base = OTHER; note = 2'-O-methyl adenosine phosphorothioate
  modified_base 18: mod_base = OTHER; note = 5-methylcytosine phosphorothioate
  modified_base 19: mod_base = OTHER; note = 2'-O-methyl uridine phosphorothioate
  modified_base 20: mod_base = OTHER; note = 2'-O-methyl guanosine
tcagcttctgttagccactg

SEQ ID NO: 27 - RNA, 20 nt, synthetic construct
  modified_base 1: mod_base = OTHER; note = thymine
  misc_feature 1..20: note = Antisense oligonucleotide
  modified_base 1: mod_base = OTHER; note = misc_feature - bicyclic nucleic acid scaffold modification
  source 1..20: mol_type = other RNA
tcagcttctgttagccactg

SEQ ID NO: 28 - RNA, 20 nt, synthetic construct
  misc_feature 1..20: note = Antisense oligonucleotide
  modified_base 20: mod_base = OTHER; note = misc_feature - bicyclic nucleic acid scaffold modification
  source 1..20: mol_type = other RNA
tcagcttctgttagccactg

SEQ ID NO: 29 - RNA, 20 nt, synthetic construct
  misc_feature 1..20: note = Antisense oligonucleotide
  source 1..20: mol_type = other RNA
  modified_base 1: mod_base = OTHER; note = misc_feature - locked thymine bicyclic nucleic acid scaffold modification phosphorothioate
  modified_base 2: mod_base = OTHER; note = 5-methylcytosine phosphorothioate
  modified_base 3: mod_base = OTHER; note = 2'-O-methyl adenosine phosphorothioate
  modified_base 4: mod_base = OTHER; note = 2'-O-methyl guanosine phosphorothioate
  modified_base 5: mod_base = OTHER; note = 5-methylcytosine phosphorothioate
  modified_base 6: mod_base = OTHER; note = 2'-O-methyl uridine phosphorothioate
  modified_base 7: mod_base = OTHER; note = 2'-O-methyl uridine phosphorothioate
  modified_base 8: mod_base = OTHER; note = 5-methylcytosine phosphorothioate
  modified_base 9: mod_base = OTHER; note = 2'-O-methyl uridine phosphorothioate
  modified_base 10: mod_base = OTHER; note = 2'-O-methyl guanosine phosphorothioate
  modified_base 11: mod_base = OTHER; note = 2'-O-methyl uridine phosphorothioate
  modified_base 12: mod_base = OTHER; note = 2'-O-methyl uridine phosphorothioate
  modified_base 13: mod_base = OTHER; note = 2'-O-methyl adenosine phosphorothioate
  modified_base 14: mod_base = OTHER; note = 2'-O-methyl guanosine phosphorothioate
  modified_base 15: mod_base = OTHER; note = 5-methylcytosine phosphorothioate
  modified_base 16: mod_base = OTHER; note = 5-methylcytosine phosphorothioate
  modified_base 17: mod_base = OTHER; note = 2'-O-methyl adenosine phosphorothioate
  modified_base 18: mod_base = OTHER; note = 5-methylcytosine phosphorothioate
  modified_base 19: mod_base = OTHER; note = 2'-O-methyl uridine phosphorothioate
  modified_base 20: mod_base = OTHER; note = misc_feature - locked bicyclic nucleic acid scaffold modification
tcagcttctgttagccactg

SEQ ID NO: 30 - RNA, 20 nt, synthetic construct
  modified_base 1: mod_base = OTHER; note = thymine
  misc_feature 1..20: note = Antisense oligonucleotide
  modified_base 1..2: mod_base = OTHER; note = misc_feature - bicyclic nucleic acid scaffold modification
  source 1..20: mol_type = other RNA
tcagcttctgttagccactg

SEQ ID NO: 31 - RNA, 20 nt, synthetic construct
  modified_base 19: mod_base = OTHER; note = thymine
  misc_feature 1..20: note = Antisense oligonucleotide
  modified_base 19..20: mod_base = OTHER; note = misc_feature - bicyclic nucleic acid scaffold modification
  source 1..20: mol_type = other RNA
tcagcttctgttagccactg

SEQ ID NO: 32 - RNA, 16 nt, synthetic construct
  misc_feature 1..16: note = Antisense oligonucleotide
  source 1..16: mol_type = other RNA
tcagcttctgttagcc

SEQ ID NO: 33 - RNA, 16 nt, synthetic construct
  modified_base 1: mod_base = OTHER; note = thymine
  misc_feature 1..16: note = Antisense oligonucleotide
  modified_base 1: mod_base = OTHER; note = misc_feature - bicyclic nucleic acid scaffold modification
  source 1..16: mol_type = other RNA
tcagcttctgttagcc

SEQ ID NO: 34 - RNA, 16 nt, synthetic construct
  misc_feature 1..16: note = Antisense oligonucleotide
  modified_base 16: mod_base = OTHER; note = misc_feature - bicyclic nucleic acid scaffold modification
  source 1..16: mol_type = other RNA
tcagcttctgttagcc

SEQ ID NO: 35 - RNA, 16 nt, synthetic construct
  modified_base 1: mod_base = OTHER; note = thymine
  misc_feature 1..16: note = Antisense oligonucleotide
  modified_base 1: mod_base = OTHER; note = misc_feature - bicyclic nucleic acid scaffold modification
  modified_base 16: mod_base = OTHER; note = misc_feature - bicyclic nucleic acid scaffold modification
  source 1..16: mol_type = other RNA
tcagcttctgttagcc

SEQ ID NO: 36 - RNA, 16 nt, synthetic construct
  modified_base 1: mod_base = OTHER; note = thymine
  misc_feature 1..16: note = Antisense oligonucleotide
  modified_base 1..2: mod_base = OTHER; note = misc_feature - bicyclic nucleic acid scaffold modification
  source 1..16: mol_type = other RNA
tcagcttctgttagcc

SEQ ID NO: 37 - RNA, 16 nt, synthetic construct
  misc_feature 1..16: note = Antisense oligonucleotide
  modified_base 15..16: mod_base = OTHER; note = misc_feature - bicyclic nucleic acid scaffold modification
  source 1..16: mol_type = other RNA
tcagcttctgttagcc

SEQ ID NO: 38 - RNA, 18 nt, synthetic construct
  misc_feature 1..18: note = Antisense oligonucleotide
  source 1..18: mol_type = other RNA
tcagcttctgttagccac

SEQ ID NO: 39 - RNA, 18 nt, synthetic construct
  modified_base 1: mod_base = OTHER; note = thymine
  misc_feature 1..18: note = Antisense oligonucleotide
  modified_base 1: mod_base = OTHER; note = misc_feature - bicyclic nucleic acid scaffold modification
  source 1..18: mol_type = other RNA
tcagcttctgttagccac

SEQ ID NO: 40 - RNA, 18 nt, synthetic construct
  misc_feature 1..18: note = Antisense oligonucleotide
  modified_base 18: mod_base = OTHER; note = misc_feature - bicyclic nucleic acid scaffold modification
  source 1..18: mol_type = other RNA
tcagcttctgttagccac

SEQ ID NO: 41 - RNA, 18 nt, synthetic construct
  modified_base 1: mod_base = OTHER; note = thymine
  misc_feature 1..18: note = Antisense oligonucleotide
  modified_base 1: mod_base = OTHER; note = misc_feature - bicyclic nucleic acid scaffold modification
  modified_base 18: mod_base = OTHER; note = misc_feature - bicyclic nucleic acid scaffold modification
  source 1..18: mol_type = other RNA
tcagcttctgttagccac

SEQ ID NO: 42 - RNA, 18 nt, synthetic construct
  modified_base 1: mod_base = OTHER; note = thymine
  misc_feature 1..18: note = Antisense oligonucleotide
  modified_base 1..2: mod_base = OTHER; note = misc_feature - bicyclic nucleic acid scaffold modification
  source 1..18: mol_type = other RNA
tcagcttctgttagccac

SEQ ID NO: 43 - RNA, 18 nt, synthetic construct
  misc_feature 1..18: note = Antisense oligonucleotide
  modified_base 17..18: mod_base = OTHER; note = misc_feature - bicyclic nucleic acid scaffold modification
  source 1..18: mol_type = other RNA
tcagcttctgttagccac

SEQ ID NO: 44 - RNA, 16 nt, synthetic construct
  misc_feature 1..16: note = Antisense oligonucleotide
  source 1..16: mol_type = other RNA
cttctgttagccactg

SEQ ID NO: 45 - RNA, 16 nt, synthetic construct
  misc_feature 1..16: note = Antisense oligonucleotide
  modified_base 1: mod_base = OTHER; note = misc_feature - bicyclic nucleic acid scaffold modification
  source 1..16: mol_type = other RNA
cttctgttagccactg

SEQ ID NO: 46 - RNA, 16 nt, synthetic construct
  misc_feature 1..16: note = Antisense oligonucleotide
  modified_base 16: mod_base = OTHER; note = misc_feature - bicyclic nucleic acid scaffold modification
  source 1..16: mol_type = other RNA
cttctgttagccactg

SEQ ID NO: 47 - RNA, 16 nt, synthetic construct
  misc_feature 1..16: note = Antisense oligonucleotide
  modified_base 1: mod_base = OTHER; note = misc_feature - bicyclic nucleic acid scaffold modification
  modified_base 16: mod_base = OTHER; note = misc_feature - bicyclic nucleic acid scaffold modification
  source 1..16: mol_type = other RNA
cttctgttagccactg

SEQ ID NO: 48 - RNA, 16 nt, synthetic construct
  modified_base 2: mod_base = OTHER; note = thymine
  misc_feature 1..16: note = Antisense oligonucleotide
  modified_base 1..2: mod_base = OTHER; note = misc_feature - bicyclic nucleic acid scaffold modification
  source 1..16: mol_type = other RNA
cttctgttagccactg

SEQ ID NO: 49 - RNA, 16 nt, synthetic construct
  modified_base 15: mod_base = OTHER; note = thymine
  misc_feature 1..16: note = Antisense oligonucleotide
  modified_base 15..16: mod_base = OTHER; note = misc_feature - bicyclic nucleic acid scaffold modification
  source 1..16: mol_type = other RNA
cttctgttagccactg

SEQ ID NO: 50 - RNA, 18 nt, synthetic construct
  misc_feature 1..18: note = Antisense oligonucleotide
  source 1..18: mol_type = other RNA
agcttctgttagccactg

SEQ ID NO: 51 - RNA, 18 nt, synthetic construct
  misc_feature 1..18: note = Antisense oligonucleotide
  modified_base 1: mod_base = OTHER; note = misc_feature - bicyclic nucleic acid scaffold modification
  source 1..18: mol_type = other RNA
agcttctgttagccactg

SEQ ID NO: 52 - RNA, 18 nt, synthetic construct
  misc_feature 1..18: note = Antisense oligonucleotide
  modified_base 18: mod_base = OTHER; note = misc_feature - bicyclic nucleic acid scaffold modification
  source 1..18: mol_type = other RNA
agcttctgttagccactg

SEQ ID NO: 53 - RNA, 18 nt, synthetic construct
  misc_feature 1..18: note = Antisense oligonucleotide
  modified_base 1: mod_base = OTHER; note = misc_feature - bicyclic nucleic acid scaffold modification
  modified_base 18: mod_base = OTHER; note = misc_feature - bicyclic nucleic acid scaffold modification
  source 1..18: mol_type = other RNA
agcttctgttagccactg

SEQ ID NO: 54 - RNA, 18 nt, synthetic construct
  misc_feature 1..18: note = Antisense oligonucleotide
  modified_base 1..2: mod_base = OTHER; note = misc_feature - bicyclic nucleic acid scaffold modification
  source 1..18: mol_type = other RNA
agcttctgttagccactg

SEQ ID NO: 55 - RNA, 18 nt, synthetic construct
  modified_base 17: mod_base = OTHER; note = thymine
  misc_feature 1..18: note = Antisense oligonucleotide
  modified_base 17..18: mod_base = OTHER; note = misc_feature - bicyclic nucleic acid scaffold modification
  source 1..18: mol_type = other RNA
agcttctgttagccactg

SEQ ID NO: 56 - RNA, 22 nt, synthetic construct
  misc_feature 1..22: note = Antisense oligonucleotide
  source 1..22: mol_type = other RNA
tcagcttctgttagccactgat

SEQ ID NO: 57 - RNA, 22 nt, synthetic construct
  modified_base 1: mod_base = OTHER; note = thymine
  misc_feature 1..22: note = Antisense oligonucleotide
  modified_base 1: mod_base = OTHER; note = misc_feature - bicyclic nucleic acid scaffold modification
  source 1..22: mol_type = other RNA
tcagcttctgttagccactgat

SEQ ID NO: 58 - RNA, 22 nt, synthetic construct
  modified_base 22: mod_base = OTHER; note = thymine
  misc_feature 1..22: note = Antisense oligonucleotide
  modified_base 22: mod_base = OTHER; note = misc_feature - bicyclic nucleic acid scaffold modification
  source 1..22: mol_type = other RNA
tcagcttctgttagccactgat

SEQ ID NO: 59 - RNA, 22 nt, synthetic construct
  modified_base 1: mod_base = OTHER; note = thymine
  modified_base 22: mod_base = OTHER; note = thymine
  misc_feature 1..22: note = Antisense oligonucleotide
  modified_base 1: mod_base = OTHER; note = misc_feature - bicyclic nucleic acid scaffold modification
  modified_base 22: mod_base = OTHER; note = misc_feature - bicyclic nucleic acid scaffold modification
  source 1..22: mol_type = other RNA
tcagcttctgttagccactgat

SEQ ID NO: 60 - RNA, 22 nt, synthetic construct
  modified_base 1: mod_base = OTHER; note = thymine
  misc_feature 1..22: note = Antisense oligonucleotide
  modified_base 1..2: mod_base = OTHER; note = misc_feature - bicyclic nucleic acid scaffold modification
  source 1..22: mol_type = other RNA
tcagcttctgttagccactgat

SEQ ID NO: 61 - RNA, 22 nt, synthetic construct
  modified_base 22: mod_base = OTHER; note = thymine
  misc_feature 1..22: note = Antisense oligonucleotide
  modified_base 21..22: mod_base = OTHER; note = misc_feature - bicyclic nucleic acid scaffold modification
  source 1..22: mol_type = other RNA
tcagcttctgttagccactgat

SEQ ID NO: 62 - RNA, 22 nt, synthetic construct
  misc_feature 1..22: note = Antisense oligonucleotide
  source 1..22: mol_type = other RNA
gttcagcttctgttagccactg

SEQ ID NO: 63 - RNA, 22 nt, synthetic construct
  misc_feature 1..22: note = Antisense oligonucleotide
  modified_base 1: mod_base = OTHER; note = misc_feature - bicyclic nucleic acid scaffold modification
  source 1..22: mol_type = other RNA
gttcagcttctgttagccactg

SEQ ID NO: 64 - RNA, 22 nt, synthetic construct
  misc_feature 1..22: note = Antisense oligonucleotide
  modified_base 22: mod_base = OTHER; note = misc_feature - bicyclic nucleic acid scaffold modification
  source 1..22: mol_type = other RNA
gttcagcttctgttagccactg

SEQ ID NO: 65 - RNA, 22 nt, synthetic construct
  misc_feature 1..22: note = Antisense oligonucleotide
  modified_base 1: mod_base = OTHER; note = misc_feature - bicyclic nucleic acid scaffold modification
  modified_base 22: mod_base = OTHER; note = misc_feature - bicyclic nucleic acid scaffold modification
  source 1..22: mol_type = other RNA
gttcagcttctgttagccactg

SEQ ID NO: 66 - RNA, 22 nt, synthetic construct
  modified_base 2: mod_base = OTHER; note = thymine
  misc_feature 1..22: note = Antisense oligonucleotide
  modified_base 1..2: mod_base = OTHER; note = misc_feature - bicyclic nucleic acid scaffold modification
  source 1..22: mol_type = other RNA
gttcagcttctgttagccactg

SEQ ID NO: 67 - RNA, 22 nt, synthetic construct
  modified_base 21: mod_base = OTHER; note = thymine
  misc_feature 1..22: note = Antisense oligonucleotide
  modified_base 21..22: mod_base = OTHER; note = misc_feature - bicyclic nucleic acid scaffold modification
  source 1..22: mol_type = other RNA
gttcagcttctgttagccactg

SEQ ID NO: 68 - RNA, 16 nt, synthetic construct
  misc_feature 1..16: note = Antisense oligonucleotide
  source 1..16: mol_type = other RNA
agcttctgttagccac

SEQ ID NO: 69 - RNA, 16 nt, synthetic construct
  misc_feature 1..16: note = Antisense oligonucleotide
  modified_base 1: mod_base = OTHER; note = misc_feature - bicyclic nucleic acid scaffold modification
  source 1..16: mol_type = other RNA
agcttctgttagccac

SEQ ID NO: 70 - RNA, 16 nt, synthetic construct
  misc_feature 1..16: note = Antisense oligonucleotide
  modified_base 16: mod_base = OTHER; note = misc_feature - bicyclic nucleic acid scaffold modification
  source 1..16: mol_type = other RNA
agcttctgttagccac

SEQ ID NO: 71 - RNA, 16 nt, synthetic construct
  misc_feature 1..16: note = Antisense oligonucleotide
  modified_base 1: mod_base = OTHER; note = misc_feature - bicyclic nucleic acid scaffold modification
  modified_base 16: mod_base = OTHER; note = misc_feature - bicyclic nucleic acid scaffold modification
  source 1..16: mol_type = other RNA
agcttctgttagccac

SEQ ID NO: 72 - RNA, 16 nt, synthetic construct
  misc_feature 1..16: note = Antisense oligonucleotide
  modified_base 1..2: mod_base = OTHER; note = misc_feature - bicyclic nucleic acid scaffold modification
  source 1..16: mol_type = other RNA
agcttctgttagccac

SEQ ID NO: 73 - RNA, 16 nt, synthetic construct
  misc_feature 1..16: note = Antisense oligonucleotide
  modified_base 15..16: mod_base = OTHER; note = misc_feature - bicyclic nucleic acid scaffold modification
  source 1..16: mol_type = other RNA
agcttctgttagccac

SEQ ID NO: 74 - RNA, 20 nt, synthetic construct
  misc_feature 1..20: note = Antisense oligonucleotide
  source 1..20: mol_type = other RNA
tttgtatttagcatgttccc

SEQ ID NO: 75 - RNA, 20 nt, synthetic construct
  modified_base 1: mod_base = OTHER; note = thymine
  misc_feature 1..20: note = Antisense oligonucleotide
  modified_base 1: mod_base = OTHER; note = misc_feature - bicyclic nucleic acid scaffold modification
  source 1..20: mol_type = other RNA
tttgtatttagcatgttccc

SEQ ID NO: 76 - RNA, 20 nt, synthetic construct
  misc_feature 1..20: note = Antisense oligonucleotide
  modified_base 20: mod_base = OTHER; note = misc_feature - bicyclic nucleic acid scaffold modification
  source 1..20: mol_type = other RNA
tttgtatttagcatgttccc

SEQ ID NO: 77 - RNA, 20 nt, synthetic construct
  modified_base 1: mod_base = OTHER; note = thymine
  misc_feature 1..20: note = Antisense oligonucleotide
  modified_base 1: mod_base = OTHER; note = misc_feature - bicyclic nucleic acid scaffold modification
  modified_base 20: mod_base = OTHER; note = misc_feature - bicyclic nucleic acid scaffold modification
  source 1..20: mol_type = other RNA
tttgtatttagcatgttccc

SEQ ID NO: 78 - RNA, 20 nt, synthetic construct
  modified_base 1..2: mod_base = OTHER; note = thymine
  misc_feature 1..20: note = Antisense oligonucleotide
  modified_base 1..2: mod_base = OTHER; note = misc_feature - bicyclic nucleic acid scaffold modification
  source 1..20: mol_type = other RNA
tttgtatttagcatgttccc

SEQ ID NO: 79 - RNA, 20 nt, synthetic construct
  misc_feature 1..20: note = Antisense oligonucleotide
  modified_base 19..20: mod_base = OTHER; note = misc_feature - bicyclic nucleic acid scaffold modification
  source 1..20: mol_type = other RNA
tttgtatttagcatgttccc

SEQ ID NO: 80 - RNA, 18 nt, synthetic construct
  misc_feature 1..18: note = Antisense oligonucleotide
  source 1..18: mol_type = other RNA
tttgtatttagcatgttc

SEQ ID NO: 81 - RNA, 18 nt, synthetic construct
  modified_base 1: mod_base = OTHER; note = thymine
  misc_feature 1..18: note = Antisense oligonucleotide
  modified_base 1: mod_base = OTHER; note = misc_feature - bicyclic nucleic acid scaffold modification
  source 1..18: mol_type = other RNA
tttgtatttagcatgttc

SEQ ID NO: 82 - RNA, 18 nt, synthetic construct
  misc_feature 1..18: note = Antisense oligonucleotide
  modified_base 18: mod_base = OTHER; note = misc_feature - bicyclic nucleic acid scaffold modification
  source 1..18: mol_type = other RNA
tttgtatttagcatgttc

SEQ ID NO: 83 - RNA, 18 nt, synthetic construct
  modified_base 1: mod_base = OTHER; note = thymine
  misc_feature 1..18: note = Antisense oligonucleotide
  modified_base 1: mod_base = OTHER; note = misc_feature - bicyclic nucleic acid scaffold modification
  modified_base 18: mod_base = OTHER; note = misc_feature - bicyclic nucleic acid scaffold modification
  source 1..18: mol_type = other RNA
tttgtatttagcatgttc

SEQ ID NO: 84 - RNA, 18 nt, synthetic construct
  modified_base 1..2: mod_base = OTHER; note = thymine
  misc_feature 1..18: note = Antisense oligonucleotide
  modified_base 1..2: mod_base = OTHER; note = misc_feature - bicyclic nucleic acid scaffold modification
  source 1..18: mol_type = other RNA
tttgtatttagcatgttc

SEQ ID NO: 85 - RNA, 18 nt, synthetic construct
  modified_base 17: mod_base = OTHER; note = thymine
  misc_feature 1..18: note = Antisense oligonucleotide
  modified_base 17..18: mod_base = OTHER; note = misc_feature - bicyclic nucleic acid scaffold modification
  source 1..18: mol_type = other RNA
tttgtatttagcatgttc

SEQ ID NO: 86 - RNA, 16 nt, synthetic construct
  misc_feature 1..16: note = Antisense oligonucleotide
  source 1..16: mol_type = other RNA
tttgtatttagcatgt

SEQ ID NO: 87 - RNA, 16 nt, synthetic construct
  modified_base 1: mod_base = OTHER; note = thymine
  misc_feature 1..16: note = Antisense oligonucleotide
  modified_base 1: mod_base = OTHER; note = misc_feature - bicyclic nucleic acid scaffold modification
  source 1..16: mol_type = other RNA
tttgtatttagcatgt

SEQ ID NO: 88 - RNA, 16 nt, synthetic construct
  modified_base 16: mod_base = OTHER; note = thymine
  misc_feature 1..16: note = Antisense oligonucleotide
  modified_base 16: mod_base = OTHER; note = misc_feature - bicyclic nucleic acid scaffold modification
  source 1..16: mol_type = other RNA
tttgtatttagcatgt

SEQ ID NO: 89 - RNA, 16 nt, synthetic construct
  modified_base 1: mod_base = OTHER; note = thymine
  modified_base 16: mod_base = OTHER; note = thymine
  misc_feature 1..16: note = Antisense oligonucleotide
  modified_base 1: mod_base = OTHER; note = misc_feature - bicyclic nucleic acid scaffold modification
  modified_base 16: mod_base = OTHER; note = misc_feature - bicyclic nucleic acid scaffold modification
  source 1..16: mol_type = other RNA
tttgtatttagcatgt

SEQ ID NO: 90 - RNA, 16 nt, synthetic construct
  modified_base 1..2: mod_base = OTHER; note = thymine
  misc_feature 1..16: note = Antisense oligonucleotide
  modified_base 1..2: mod_base = OTHER; note = misc_feature - bicyclic nucleic acid scaffold modification
  source 1..16: mol_type = other RNA
tttgtatttagcatgt

SEQ ID NO: 91 - RNA, 16 nt, synthetic construct
  modified_base 16: mod_base = OTHER; note = thymine
  misc_feature 1..16: note = Antisense oligonucleotide
  modified_base 15..16: mod_base = OTHER; note = misc_feature - bicyclic nucleic acid scaffold modification
  source 1..16: mol_type = other RNA
tttgtatttagcatgt

SEQ ID NO: 92 - RNA, 18 nt, synthetic construct
  misc_feature 1..18: note = Antisense oligonucleotide
  source 1..18: mol_type = other RNA
tgtatttagcatgttccc

SEQ ID NO: 93 - RNA, 18 nt, synthetic construct
  modified_base 1: mod_base = OTHER; note = thymine
  misc_feature 1..18: note = Antisense oligonucleotide
  modified_base 1: mod_base = OTHER; note = misc_feature - bicyclic nucleic acid scaffold modification
  source 1..18: mol_type = other RNA
tgtatttagcatgttccc

SEQ ID NO: 94 - RNA, 18 nt, synthetic construct
  misc_feature 1..18: note = Antisense oligonucleotide
  modified_base 18: mod_base = OTHER; note = misc_feature - bicyclic nucleic acid scaffold modification
  source 1..18: mol_type = other RNA
tgtatttagcatgttccc

SEQ ID NO: 95 - RNA, 18 nt, synthetic construct
  modified_base 1: mod_base = OTHER; note = thymine
  misc_feature 1..18: note = Antisense oligonucleotide
  modified_base 1: mod_base = OTHER; note = misc_feature - bicyclic nucleic acid scaffold modification
  modified_base 18: mod_base = OTHER; note = misc_feature - bicyclic nucleic acid scaffold modification
  source 1..18: mol_type = other RNA
tgtatttagcatgttccc

SEQ ID NO: 96 - RNA, 18 nt, synthetic construct
  modified_base 1: mod_base = OTHER; note = thymine
  misc_feature 1..18: note = Antisense oligonucleotide
  modified_base 1..2: mod_base = OTHER; note = misc_feature - bicyclic nucleic acid scaffold modification
  source 1..18: mol_type = other RNA
tgtatttagcatgttccc

SEQ ID NO: 97 - RNA, 18 nt, synthetic construct
  misc_feature 1..18: note = Antisense oligonucleotide
  modified_base 17..18: mod_base = OTHER; note = misc_feature - bicyclic nucleic acid scaffold modification
  source 1..18: mol_type = other RNA
tgtatttagcatgttccc

SEQ ID NO: 98 - RNA, 16 nt, synthetic construct
  misc_feature 1..16: note = Antisense oligonucleotide
  source 1..16: mol_type = other RNA
tatttagcatgttccc

SEQ ID NO: 99 - RNA, 16 nt, synthetic construct
  modified_base 1: mod_base = OTHER; note = thymine
  misc_feature 1..16: note = Antisense oligonucleotide
  modified_base 1: mod_base = OTHER; note = misc_feature - bicyclic nucleic acid scaffold modification
  source 1..16: mol_type = other RNA
tatttagcatgttccc

SEQ ID NO: 100 - RNA, 16 nt, synthetic construct
  misc_feature 1..16: note = Antisense oligonucleotide
  modified_base 16: mod_base = OTHER; note = misc_feature - bicyclic nucleic acid scaffold modification
  source 1..16: mol_type = other RNA
tatttagcatgttccc

SEQ ID NO: 101 - RNA, 16 nt, synthetic construct
  modified_base 1: mod_base = OTHER; note = thymine
  misc_feature 1..16: note = Antisense oligonucleotide
  modified_base 1: mod_base = OTHER; note = misc_feature - bicyclic nucleic acid scaffold modification
  modified_base 16: mod_base = OTHER; note = misc_feature - bicyclic nucleic acid scaffold modification
  source 1..16: mol_type = other RNA
tatttagcatgttccc

SEQ ID NO: 102 - RNA, 16 nt, synthetic construct
  modified_base 1: mod_base = OTHER; note = thymine
  misc_feature 1..16: note = Antisense oligonucleotide
  modified_base 1..2: mod_base = OTHER; note = misc_feature - bicyclic nucleic acid scaffold modification
  source 1..16: mol_type = other RNA
tatttagcatgttccc

SEQ ID NO: 103 - RNA, 16 nt, synthetic construct
  misc_feature 1..16: note = Antisense oligonucleotide
  modified_base 15..16: mod_base = OTHER; note = misc_feature - bicyclic nucleic acid scaffold modification
  source 1..16: mol_type = other RNA
tatttagcatgttccc

SEQ ID NO: 104 - RNA, 22 nt, synthetic construct
  misc_feature 1..22: note = Antisense oligonucleotide
  source 1..22: mol_type = other RNA
tttgtatttagcatgttcccaa

SEQ ID NO: 105 - RNA, 22 nt, synthetic construct
  modified_base 1: mod_base = OTHER; note = thymine
  misc_feature 1..22: note = Antisense oligonucleotide
  modified_base 1: mod_base = OTHER; note = misc_feature - bicyclic nucleic acid scaffold modification
  source 1..22: mol_type = other RNA
tttgtatttagcatgttcccaa

SEQ ID NO: 106 - RNA, 22 nt, synthetic construct
  misc_feature 1..22: note = Antisense oligonucleotide
  modified_base 22: mod_base = OTHER; note = misc_feature - bicyclic nucleic acid scaffold modification
  source 1..22: mol_type = other RNA
tttgtatttagcatgttcccaa

SEQ ID NO: 107 - RNA, 22 nt, synthetic construct
  modified_base 1: mod_base = OTHER; note = thymine
  misc_feature 1..22: note = Antisense oligonucleotide
  modified_base 1: mod_base = OTHER; note = misc_feature - bicyclic nucleic acid scaffold modification
  modified_base 22: mod_base = OTHER; note = misc_feature - bicyclic nucleic acid scaffold modification
  source 1..22: mol_type = other RNA
tttgtatttagcatgttcccaa

SEQ ID NO: 108 - RNA, 22 nt, synthetic construct
  modified_base 1..2: mod_base = OTHER; note = thymine
  misc_feature 1..22: note = Antisense oligonucleotide
  modified_base 1..2: mod_base = OTHER; note = misc_feature - bicyclic nucleic acid scaffold modification
  source 1..22: mol_type = other RNA
tttgtatttagcatgttcccaa

SEQ ID NO: 109 - RNA, 22 nt, synthetic construct
  misc_feature 1..22: note = Antisense oligonucleotide
  modified_base 21..22: mod_base = OTHER; note = misc_feature - bicyclic nucleic acid scaffold modification
  source 1..22: mol_type = other RNA
tttgtatttagcatgttcccaa

SEQ ID NO: 110 - RNA, 22 nt, synthetic construct
  misc_feature 1..22: note = Antisense oligonucleotide
  source 1..22: mol_type = other RNA
catttgtatttagcatgttccc

SEQ ID NO: 111 - RNA, 22 nt, synthetic construct
  misc_feature 1..22: note = Antisense oligonucleotide
  modified_base 1: mod_base = OTHER; note = misc_feature - bicyclic nucleic acid scaffold modification
  source 1..22: mol_type = other RNA
catttgtatttagcatgttccc

SEQ ID NO: 112 - RNA, 22 nt, synthetic construct
  misc_feature 1..22: note = Antisense oligonucleotide
  modified_base 22: mod_base = OTHER; note = misc_feature - bicyclic nucleic acid scaffold modification
  source 1..22: mol_type = other RNA
catttgtatttagcatgttccc

SEQ ID NO: 113 - RNA, 22 nt, synthetic construct
  misc_feature 1..22: note = Antisense oligonucleotide
  modified_base 1: mod_base = OTHER; note = misc_feature - bicyclic nucleic acid scaffold modification
  modified_base 22: mod_base = OTHER; note = misc_feature - bicyclic nucleic acid scaffold modification
  source 1..22: mol_type = other RNA
catttgtatttagcatgttccc

SEQ ID NO: 114 - RNA, 22 nt, synthetic construct
  misc_feature 1..22: note = Antisense oligonucleotide
  modified_base 1..2: mod_base = OTHER; note = misc_feature - bicyclic nucleic acid scaffold modification
  source 1..22: mol_type = other RNA
catttgtatttagcatgttccc

SEQ ID NO: 115 - RNA, 22 nt, synthetic construct
  misc_feature 1..22: note = Antisense oligonucleotide
  modified_base 21..22: mod_base = OTHER; note = misc_feature - bicyclic nucleic acid scaffold modification
  source 1..22: mol_type = other RNA
catttgtatttagcatgttccc

SEQ ID NO: 116 - RNA, 23 nt, synthetic construct
  misc_feature 1..23: note = Antisense oligonucleotide
  source 1..23: mol_type = other RNA
attctcaggaatttgtgtctttc

SEQ ID NO: 117 - RNA, 23 nt, synthetic construct
  misc_feature 1..23: note = Antisense oligonucleotide
  modified_base 1: mod_base = OTHER; note = misc_feature - bicyclic nucleic acid scaffold modification
  source 1..23: mol_type = other RNA
attctcaggaatttgtgtctttc

SEQ ID NO: 118 - RNA, 23 nt, synthetic construct
  misc_feature 1..23: note = Antisense oligonucleotide
  modified_base 23: mod_base = OTHER; note = misc_feature - bicyclic nucleic acid scaffold modification
  source 1..23: mol_type = other RNA
attctcaggaatttgtgtctttc

SEQ ID NO: 119 - RNA, 23 nt, synthetic construct
  misc_feature 1..23: note = Antisense oligonucleotide
  modified_base 1: mod_base = OTHER; note = misc_feature - bicyclic nucleic acid scaffold modification
  modified_base 23: mod_base = OTHER; note = misc_feature - bicyclic nucleic acid scaffold modification
  source 1..23: mol_type = other RNA
attctcaggaatttgtgtctttc

SEQ ID NO: 120 - RNA, 23 nt, synthetic construct
  modified_base 2: mod_base = OTHER; note = thymine
  misc_feature 1..23: note = Antisense oligonucleotide
  modified_base 1..2: mod_base = OTHER; note = misc_feature - bicyclic nucleic acid scaffold modification
  source 1..23: mol_type = other RNA
attctcaggaatttgtgtctttc

SEQ ID NO: 121 - RNA, 23 nt, synthetic construct
  modified_base 22: mod_base = OTHER; note = thymine
  misc_feature 1..23: note = Antisense oligonucleotide
  modified_base 22..23: mod_base = OTHER; note = misc_feature - bicyclic nucleic acid scaffold modification
  source 1..23: mol_type = other RNA
attctcaggaatttgtgtctttc

SEQ ID NO: 122 - RNA, 20 nt, synthetic construct
  misc_feature 1..20: note = Antisense oligonucleotide
  source 1..20: mol_type = other RNA
attctcaggaatttgtgtct

SEQ ID NO: 123 - RNA, 20 nt, synthetic construct
  misc_feature 1..20: note = Antisense oligonucleotide
  modified_base 1: mod_base = OTHER; note = misc_feature - bicyclic nucleic acid scaffold modification
  source 1..20: mol_type = other RNA
attctcaggaatttgtgtct

SEQ ID NO: 124 - RNA, 20 nt, synthetic construct
  modified_base 20: mod_base = OTHER; note = thymine
  misc_feature 1..20: note = Antisense oligonucleotide
  modified_base 20: mod_base = OTHER; note = misc_feature - bicyclic nucleic acid scaffold modification
  source 1..20: mol_type = other RNA
attctcaggaatttgtgtct

SEQ ID NO: 125 - RNA, 20 nt, synthetic construct
  modified_base 20: mod_base = OTHER; note = thymine
  misc_feature 1..20: note = Antisense oligonucleotide
  modified_base 1: mod_base = OTHER; note = misc_feature - bicyclic nucleic acid scaffold modification
  modified_base 20: mod_base = OTHER; note = misc_feature - bicyclic nucleic acid scaffold modification
  source 1..20: mol_type = other RNA
attctcaggaatttgtgtct

SEQ ID NO: 126 - RNA, 20 nt, synthetic construct
  modified_base 2: mod_base = OTHER; note = thymine
  misc_feature 1..20: note = Antisense oligonucleotide
  modified_base 1..2: mod_base = OTHER; note = misc_feature - bicyclic nucleic acid scaffold modification
  source 1..20: mol_type = other RNA
attctcaggaatttgtgtct

SEQ ID NO: 127 - RNA, 20 nt, synthetic construct
  modified_base 20: mod_base = OTHER; note = thymine
  misc_feature 1..20: note = Antisense oligonucleotide
  modified_base 19..20: mod_base = OTHER; note = misc_feature - bicyclic nucleic acid scaffold modification
  source 1..20: mol_type = other RNA
attctcaggaatttgtgtct

SEQ ID NO: 128 - RNA, 18 nt, synthetic construct
  misc_feature 1..18: note = Antisense oligonucleotide
  source 1..18: mol_type = other RNA
attctcaggaatttgtgt

SEQ ID NO: 129 - RNA, 18 nt, synthetic construct
  misc_feature 1..18: note = Antisense oligonucleotide
  modified_base 1: mod_base = OTHER; note = misc_feature - bicyclic nucleic acid scaffold modification
  source 1..18: mol_type = other RNA
attctcaggaatttgtgt

SEQ ID NO: 130 - RNA, 18 nt, synthetic construct
  modified_base 18: mod_base = OTHER; note = thymine
  misc_feature 1..18: note = Antisense oligonucleotide
  modified_base 18: mod_base = OTHER; note = misc_feature - bicyclic nucleic acid scaffold modification
  source 1..18: mol_type = other RNA
attctcaggaatttgtgt

SEQ ID NO: 131 - RNA, 18 nt, synthetic construct
  modified_base 18: mod_base = OTHER; note = thymine
  misc_feature 1..18: note = Antisense oligonucleotide
  modified_base 1: mod_base = OTHER; note = misc_feature - bicyclic nucleic acid scaffold modification
  modified_base 18: mod_base = OTHER; note = misc_feature - bicyclic nucleic acid scaffold modification
  source 1..18: mol_type = other RNA
attctcaggaatttgtgt

SEQ ID NO: 132 - RNA, 18 nt, synthetic construct
  modified_base 2: mod_base = OTHER; note = thymine
  misc_feature 1..18: note = Antisense oligonucleotide
  modified_base 1..2: mod_base = OTHER; note = misc_feature - bicyclic nucleic acid scaffold modification
  source 1..18: mol_type = other RNA
attctcaggaatttgtgt

SEQ ID NO: 133 - RNA, 18 nt, synthetic construct
  modified_base 18: mod_base = OTHER; note = thymine
  misc_feature 1..18: note = Antisense oligonucleotide
  modified_base 17..18: mod_base = OTHER; note = misc_feature - bicyclic nucleic acid scaffold modification
  source 1..18: mol_type = other RNA
attctcaggaatttgtgt

SEQ ID NO: 134 - RNA, 16 nt, synthetic construct
  misc_feature 1..16: note = Antisense oligonucleotide
  source 1..16: mol_type = other RNA
attctcaggaatttgt

SEQ ID NO: 135 - RNA, 16 nt, synthetic construct
  misc_feature 1..16: note = Antisense oligonucleotide
  modified_base 1: mod_base = OTHER; note = misc_feature - bicyclic nucleic acid scaffold modification
  source 1..16: mol_type = other RNA
attctcaggaatttgt

SEQ ID NO: 136 - RNA, 16 nt, synthetic construct
  modified_base 16: mod_base = OTHER; note = thymine
  misc_feature 1..16: note = Antisense oligonucleotide
  modified_base 16: mod_base = OTHER; note = misc_feature - bicyclic nucleic acid scaffold modification
  source 1..16: mol_type = other RNA
attctcaggaatttgt

SEQ ID NO: 137 - RNA, 16 nt, synthetic construct
  modified_base 16: mod_base = OTHER; note = thymine
  misc_feature 1..16: note = Antisense oligonucleotide
  modified_base 1: mod_base = OTHER; note = misc_feature - bicyclic nucleic acid scaffold modification
  modified_base 16: mod_base = OTHER; note = misc_feature - bicyclic nucleic acid scaffold modification
  source 1..16: mol_type = other RNA
attctcaggaatttgt

SEQ ID NO: 138 - RNA, 16 nt, synthetic construct
  modified_base 2: mod_base = OTHER; note = thymine
  misc_feature 1..16: note = Antisense oligonucleotide
  modified_base 1..2: mod_base = OTHER; note = misc_feature - bicyclic nucleic acid scaffold modification
  source 1..16: mol_type = other RNA
attctcaggaatttgt

SEQ ID NO: 139 - RNA, 16 nt, synthetic construct
  modified_base 16: mod_base = OTHER; note = thymine
  misc_feature 1..16: note = Antisense oligonucleotide
  modified_base 15..16: mod_base = OTHER; note = misc_feature - bicyclic nucleic acid scaffold modification
  source 1..16: mol_type = other RNA
attctcaggaatttgt

SEQ ID NO: 140 - RNA, 20 nt, synthetic construct
  misc_feature 1..20: note = Antisense oligonucleotide
  source 1..20: mol_type = other RNA
ctcaggaatttgtgtctttc

SEQ ID NO: 141 - RNA, 20 nt, synthetic construct
  misc_feature 1..20: note = Antisense oligonucleotide
  modified_base 1: mod_base = OTHER; note = misc_feature - bicyclic nucleic acid scaffold modification
  source 1..20: mol_type = other RNA
ctcaggaatttgtgtctttc

SEQ ID NO: 142 - RNA, 20 nt, synthetic construct
  misc_feature 1..20: note = Antisense oligonucleotide
  modified_base 20: mod_base = OTHER; note = misc_feature - bicyclic nucleic acid scaffold modification
  source 1..20: mol_type = other RNA
ctcaggaatttgtgtctttc

SEQ ID NO: 143 - RNA, 20 nt, synthetic construct
  misc_feature 1..20: note = Antisense oligonucleotide
  modified_base 1: mod_base = OTHER; note = misc_feature - bicyclic nucleic acid scaffold modification
  modified_base 20: mod_base = OTHER; note = misc_feature - bicyclic nucleic acid scaffold modification
  source 1..20: mol_type = other RNA
ctcaggaatttgtgtctttc

SEQ ID NO: 144 - RNA, 20 nt, synthetic construct
  modified_base 2: mod_base = OTHER; note = thymine
  misc_feature 1..20: note = Antisense oligonucleotide
  modified_base 1..2: mod_base = OTHER; note = misc_feature - bicyclic nucleic acid scaffold modification
  source 1..20: mol_type = other RNA
ctcaggaatttgtgtctttc

SEQ ID NO: 145 - RNA, 20 nt, synthetic construct
  modified_base 19: mod_base = OTHER; note = thymine
  misc_feature 1..20: note = Antisense oligonucleotide
  modified_base 19..20: mod_base = OTHER; note = misc_feature - bicyclic nucleic acid scaffold modification
  source 1..20: mol_type = other RNA
ctcaggaatttgtgtctttc

SEQ ID NO: 146 - RNA, 18 nt, synthetic construct
  misc_feature 1..18: note = Antisense oligonucleotide
  source 1..18: mol_type = other RNA
caggaatttgtgtctttc

SEQ ID NO: 147 - RNA, 18 nt, synthetic construct
  misc_feature 1..18: note = Antisense oligonucleotide
  modified_base 1: mod_base = OTHER; note = misc_feature - bicyclic nucleic acid scaffold modification
  source 1..18: mol_type = other RNA
caggaatttgtgtctttc

SEQ ID NO: 148 - RNA, 18 nt, synthetic construct
  misc_feature 1..18: note = Antisense oligonucleotide
  modified_base 18: mod_base = OTHER; note = misc_feature - bicyclic nucleic acid scaffold modification
  source 1..18: mol_type = other RNA
caggaatttgtgtctttc

SEQ ID NO: 149 - RNA, 18 nt, synthetic construct
  misc_feature 1..18: note = Antisense oligonucleotide
  modified_base 1: mod_base = OTHER; note = misc_feature - bicyclic nucleic acid scaffold modification
  modified_base 18: mod_base = OTHER; note = misc_feature - bicyclic nucleic acid scaffold modification
  source 1..18: mol_type = other RNA
caggaatttgtgtctttc

SEQ ID NO: 150 - RNA, 18 nt, synthetic construct
  misc_feature 1..18: note = Antisense oligonucleotide
  modified_base 1..2: mod_base = OTHER; note = misc_feature - bicyclic nucleic acid scaffold modification
  source 1..18: mol_type = other RNA
caggaatttgtgtctttc

SEQ ID NO: 151 - RNA, 18 nt, synthetic construct
  modified_base 17: mod_base = OTHER; note = thymine
  misc_feature 1..18: note = Antisense oligonucleotide
  modified_base 17..18: mod_base = OTHER; note = misc_feature - bicyclic nucleic acid scaffold modification
  source 1..18: mol_type = other RNA
caggaatttgtgtctttc

SEQ ID NO: 152 - RNA, 16 nt, synthetic construct
  misc_feature 1..16: note = Antisense oligonucleotide
  source 1..16: mol_type = other RNA
ggaatttgtgtctttc

SEQ ID NO: 153 - RNA, 16 nt, synthetic construct
  misc_feature 1..16: note = Antisense oligonucleotide
  modified_base 1: mod_base = OTHER; note = misc_feature - bicyclic nucleic acid scaffold modification
  source 1..16: mol_type = other RNA
ggaatttgtgtctttc

SEQ ID NO: 154 - RNA, 16 nt, synthetic construct
  misc_feature 1..16: note = Antisense oligonucleotide
  modified_base 16: mod_base = OTHER; note = misc_feature - bicyclic nucleic acid scaffold modification
  source 1..16: mol_type = other RNA
ggaatttgtgtctttc

SEQ ID NO: 155 - RNA, 16 nt, synthetic construct
  misc_feature 1..16: note = Antisense oligonucleotide
  modified_base 1: mod_base = OTHER; note = misc_feature - bicyclic nucleic acid scaffold modification
  modified_base 16: mod_base = OTHER; note = misc_feature - bicyclic nucleic acid scaffold modification
  source 1..16: mol_type = other RNA
ggaatttgtgtctttc

SEQ ID NO: 156 - RNA, 16 nt, synthetic construct
  misc_feature 1..16: note = Antisense oligonucleotide
  modified_base 1..2: mod_base = OTHER; note = misc_feature - bicyclic nucleic acid scaffold modification
  source 1..16: mol_type = other RNA
ggaatttgtgtctttc

SEQ ID NO: 157 - RNA, 16 nt, synthetic construct
  modified_base 15: mod_base = OTHER; note = thymine
  misc_feature 1..16: note = Antisense oligonucleotide
  modified_base 15..16: mod_base = OTHER; note = misc_feature - bicyclic nucleic acid scaffold modification
  source 1..16: mol_type = other RNA
ggaatttgtgtctttc

SEQ ID NO: 158 - RNA, 23 nt, synthetic construct
  misc_feature 1..23: note = Antisense oligonucleotide
  source 1..23: mol_type = other RNA
ccatttgtatttagcatgttccc

SEQ ID NO: 159 - RNA, 23 nt, synthetic construct
  misc_feature 1..23: note = Antisense oligonucleotide
  modified_base 1: mod_base = OTHER; note = misc_feature - bicyclic nucleic acid scaffold modification
  source 1..23: mol_type = other RNA
ccatttgtatttagcatgttccc

SEQ ID NO: 160 - RNA, 23 nt, synthetic construct
  misc_feature 1..23: note = Antisense oligonucleotide
  modified_base 23: mod_base = OTHER; note = misc_feature - bicyclic nucleic acid scaffold modification
  source 1..23: mol_type = other RNA
ccatttgtatttagcatgttccc

SEQ ID NO: 161 - RNA, 23 nt, synthetic construct
  misc_feature 1..23: note = Antisense oligonucleotide
  modified_base 1: mod_base = OTHER; note = misc_feature - bicyclic nucleic acid scaffold modification
  modified_base 23: mod_base = OTHER; note = misc_feature - bicyclic nucleic acid scaffold modification
  source 1..23: mol_type = other RNA
ccatttgtatttagcatgttccc

SEQ ID NO: 162 - RNA, 23 nt, synthetic construct
  misc_feature 1..23: note = Antisense oligonucleotide
  modified_base 1..2: mod_base = OTHER; note = misc_feature - bicyclic nucleic acid scaffold modification
  source 1..23: mol_type = other RNA
ccatttgtatttagcatgttccc

SEQ ID NO: 163 - RNA, 23 nt, synthetic construct
  misc_feature 1..23: note = Antisense oligonucleotide
  modified_base 22..23: mod_base = OTHER; note = misc_feature - bicyclic nucleic acid scaffold modification
  source 1..23: mol_type = other RNA
ccatttgtatttagcatgttccc

SEQ ID NO: 164 - RNA, 20 nt, synthetic construct
  misc_feature 1..20: note = Antisense oligonucleotide
  source 1..20: mol_type = other RNA
ccatttgtatttagcatgtt

SEQ ID NO: 165 - RNA, 20 nt, synthetic construct
  misc_feature 1..20: note = Antisense oligonucleotide
  modified_base 1: mod_base = OTHER; note = misc_feature - bicyclic nucleic acid scaffold modification
  source 1..20: mol_type = other RNA
ccatttgtatttagcatgtt

SEQ ID NO: 166 - RNA, 20 nt, synthetic construct
  modified_base 20: mod_base = OTHER; note = thymine
  misc_feature 1..20: note = Antisense oligonucleotide
  modified_base 20: mod_base = OTHER; note = misc_feature - bicyclic nucleic acid scaffold modification
  source 1..20: mol_type = other RNA
ccatttgtatttagcatgtt

SEQ ID NO: 167 - RNA, 20 nt, synthetic construct
  modified_base 20: mod_base = OTHER; note = thymine
  misc_feature 1..20: note = Antisense oligonucleotide
  modified_base 1: mod_base = OTHER; note = misc_feature - bicyclic nucleic acid scaffold modification
  modified_base 20: mod_base = OTHER; note = misc_feature - bicyclic nucleic acid scaffold modification
  source 1..20: mol_type = other RNA
ccatttgtatttagcatgtt

SEQ ID NO: 168 - RNA, 20 nt, synthetic construct
  misc_feature 1..20: note = Antisense oligonucleotide
  modified_base 1..2: mod_base = OTHER; note = misc_feature - bicyclic nucleic acid scaffold modification
  source 1..20: mol_type = other RNA
ccatttgtatttagcatgtt

SEQ ID NO: 169 - RNA, 20 nt, synthetic construct
  modified_base 19..20: mod_base = OTHER; note = thymine
  misc_feature 1..20: note = Antisense oligonucleotide
  modified_base 19..20: mod_base = OTHER; note = misc_feature - bicyclic nucleic acid scaffold modification
  source 1..20: mol_type = other RNA
ccatttgtatttagcatgtt

SEQ ID NO: 170 - RNA, 18 nt, synthetic construct
  misc_feature 1..18: note = Antisense oligonucleotide
  source 1..18: mol_type = other RNA
ccatttgtatttagcatg

SEQ ID NO: 171 - RNA, 18 nt, synthetic construct
  misc_feature 1..18: note = Antisense oligonucleotide
  modified_base 1: mod_base = OTHER; note = misc_feature - bicyclic nucleic acid scaffold modification
  source 1..18: mol_type = other RNA
ccatttgtatttagcatg

SEQ ID NO: 172 - RNA, 18 nt, synthetic construct
  misc_feature 1..18: note = Antisense oligonucleotide
  modified_base 18: mod_base = OTHER; note = misc_feature - bicyclic nucleic acid scaffold modification
  source 1..18: mol_type = other RNA
ccatttgtatttagcatg

SEQ ID NO: 173 - RNA, 18 nt, synthetic construct
  misc_feature 1..18: note = Antisense oligonucleotide
  modified_base 1: mod_base = OTHER; note = misc_feature - bicyclic nucleic acid scaffold modification
  modified_base 18: mod_base = OTHER; note = misc_feature - bicyclic nucleic acid scaffold modification
  source 1..18: mol_type = other RNA
ccatttgtatttagcatg

SEQ ID NO: 174 - RNA, 18 nt, synthetic construct
  misc_feature 1..18: note = Antisense oligonucleotide
  modified_base 1..2: mod_base = OTHER; note = misc_feature - bicyclic nucleic acid scaffold modification
  source 1..18: mol_type = other RNA
ccatttgtatttagcatg

SEQ ID NO: 175 - RNA, 18 nt, synthetic construct
  modified_base 17: mod_base = OTHER; note = thymine
  misc_feature 1..18: note = Antisense oligonucleotide
  modified_base 17..18: mod_base = OTHER; note = misc_feature - bicyclic nucleic acid scaffold modification
  source 1..18: mol_type = other RNA
ccatttgtatttagcatg

SEQ ID NO: 176 - RNA, 16 nt, synthetic construct
  misc_feature 1..16: note = Antisense oligonucleotide
  source 1..16: mol_type = other RNA
ccatttgtatttagca

SEQ ID NO: 177 - RNA, 16 nt, synthetic construct
  misc_feature 1..16: note = Antisense oligonucleotide
  modified_base 1: mod_base = OTHER; note = misc_feature - bicyclic nucleic acid scaffold modification
  source 1..16: mol_type = other RNA
ccatttgtatttagca

SEQ ID NO: 178 - RNA, 16 nt, synthetic construct
  misc_feature 1..16: note = Antisense oligonucleotide
  modified_base 16: mod_base = OTHER; note = misc_feature - bicyclic nucleic acid scaffold modification
  source 1..16: mol_type = other RNA
ccatttgtatttagca

SEQ ID NO: 179 - RNA, 16 nt, synthetic construct
  misc_feature 1..16: note = Antisense oligonucleotide
  modified_base 1: mod_base = OTHER; note = misc_feature - bicyclic nucleic acid scaffold modification
  modified_base 16: mod_base = OTHER; note = misc_feature - bicyclic nucleic acid scaffold modification
  source 1..16: mol_type = other RNA
ccatttgtatttagca

SEQ ID NO: 180 - RNA, 16 nt, synthetic construct
  misc_feature 1..16: note = Antisense oligonucleotide
  modified_base 1..2: mod_base = OTHER; note = misc_feature - bicyclic nucleic acid scaffold modification
  source 1..16: mol_type = other RNA
ccatttgtatttagca

SEQ ID NO: 181 - RNA, 16 nt, synthetic construct
  misc_feature 1..16: note = Antisense oligonucleotide
  modified_base 15..16: mod_base = OTHER; note = misc_feature - bicyclic nucleic acid scaffold modification
  source 1..16: mol_type = other RNA
ccatttgtatttagca

SEQ ID NO: 182 - RNA, 20 nt, synthetic construct
  misc_feature 1..20: note = Antisense oligonucleotide
  source 1..20: mol_type = other RNA
tttgtatttagcatgttccc

SEQ ID NO: 183 - RNA, 20 nt, synthetic construct
  modified_base 1: mod_base = OTHER; note = thymine
  misc_feature 1..20: note = Antisense oligonucleotide
  modified_base 1: mod_base = OTHER; note = misc_feature - bicyclic nucleic acid scaffold modification
  source 1..20: mol_type = other RNA
tttgtatttagcatgttccc

SEQ ID NO: 184 - RNA, 20 nt, synthetic construct
  misc_feature 1..20: note = Antisense oligonucleotide
  modified_base 20: mod_base = OTHER; note = misc_feature - bicyclic nucleic acid scaffold modification
  source 1..20: mol_type = other RNA
tttgtatttagcatgttccc

SEQ ID NO: 185 - RNA, 20 nt, synthetic construct
  modified_base 1: mod_base = OTHER; note = thymine
  misc_feature 1..20: note = Antisense oligonucleotide
  modified_base 1: mod_base = OTHER; note = misc_feature - bicyclic nucleic acid scaffold modification
  modified_base 20: mod_base = OTHER; note = misc_feature - bicyclic nucleic acid scaffold modification
  source 1..20: mol_type = other RNA
tttgtatttagcatgttccc

SEQ ID NO: 186 - RNA, 20 nt, synthetic construct
  modified_base 1..2: mod_base = OTHER; note = thymine
  misc_feature 1..20: note = Antisense oligonucleotide
  modified_base 1..2: mod_base = OTHER; note = misc_feature - bicyclic nucleic acid scaffold modification
  source 1..20: mol_type = other RNA
tttgtatttagcatgttccc

SEQ ID NO: 187 - RNA, 20 nt, synthetic construct
  misc_feature 1..20: note = Antisense oligonucleotide
  modified_base 19..20: mod_base = OTHER; note = misc_feature - bicyclic nucleic acid scaffold modification
  source 1..20: mol_type = other RNA
tttgtatttagcatgttccc

SEQ ID NO: 188 - RNA, 18 nt, synthetic construct
  misc_feature 1..18: note = Antisense oligonucleotide
  source 1..18: mol_type = other RNA
tgtatttagcatgttccc

SEQ ID NO: 189 - RNA, 18 nt, synthetic construct
  modified_base 1: mod_base = OTHER; note = thymine
  misc_feature 1..18: note = Antisense oligonucleotide
  modified_base 1: mod_base = OTHER; note = misc_feature - bicyclic nucleic acid scaffold modification
  source 1..18: mol_type = other RNA
tgtatttagcatgttccc

SEQ ID NO: 190 - RNA, 18 nt, synthetic construct
  misc_feature 1..18: note = Antisense oligonucleotide
  modified_base 18: mod_base = OTHER; note = misc_feature - bicyclic nucleic acid scaffold modification
  source 1..18: mol_type = other RNA
tgtatttagcatgttccc

SEQ ID NO: 191 - RNA, 18 nt, synthetic construct
  modified_base 1: mod_base = OTHER; note = thymine
  misc_feature 1..18: note = Antisense oligonucleotide
  modified_base 1: mod_base = OTHER; note = misc_feature - bicyclic nucleic acid scaffold modification
  modified_base 18: mod_base = OTHER; note = misc_feature - bicyclic nucleic acid scaffold modification
  source 1..18: mol_type = other RNA
tgtatttagcatgttccc

SEQ ID NO: 192 - RNA, 18 nt, synthetic construct
  modified_base 1: mod_base = OTHER; note = thymine
  misc_feature 1..18: note = Antisense oligonucleotide
  modified_base 1..2: mod_base = OTHER; note = misc_feature - bicyclic nucleic acid scaffold modification
  source 1..18: mol_type = other RNA
tgtatttagcatgttccc

SEQ ID NO: 193 - RNA, 18 nt, synthetic construct
  misc_feature 1..18: note = Antisense oligonucleotide
  modified_base 17..18: mod_base = OTHER; note = misc_feature - bicyclic nucleic acid scaffold modification
  source 1..18: mol_type = other RNA
tgtatttagcatgttccc

SEQ ID NO: 194 - RNA, 16 nt, synthetic construct
  misc_feature 1..16: note = Antisense oligonucleotide
  source 1..16: mol_type = other RNA
tatttagcatgttccc

SEQ ID NO: 195 - RNA, 16 nt, synthetic construct
  modified_base 1: mod_base = OTHER; note = thymine
  misc_feature 1..16: note = Antisense oligonucleotide
  modified_base 1: mod_base = OTHER; note = misc_feature - bicyclic nucleic acid scaffold modification
  source 1..16: mol_type = other RNA
tatttagcatgttccc

SEQ ID NO: 196 - RNA, 16 nt, synthetic construct
  misc_feature 1..16: note = Antisense oligonucleotide
  modified_base 16: mod_base = OTHER; note = misc_feature - bicyclic nucleic acid scaffold modification
  source 1..16: mol_type = other RNA
tatttagcatgttccc

SEQ ID NO: 197 - RNA, 16 nt, synthetic construct
  modified_base 1: mod_base = OTHER; note = thymine
  misc_feature 1..16: note = Antisense oligonucleotide
  modified_base 1: mod_base = OTHER; note = misc_feature - bicyclic nucleic acid scaffold modification
  modified_base 16: mod_base = OTHER; note = misc_feature - bicyclic nucleic acid scaffold modification
  source 1..16: mol_type = other RNA
tatttagcatgttccc

SEQ ID NO: 198 - RNA, 16 nt, synthetic construct
  modified_base 1: mod_base = OTHER; note = thymine
  misc_feature 1..16: note = Antisense oligonucleotide
  modified_base 1..2: mod_base = OTHER; note = misc_feature - bicyclic nucleic acid scaffold modification
  source 1..16: mol_type = other RNA
tatttagcatgttccc

SEQ ID NO: 199 - RNA, 16 nt, synthetic construct
  misc_feature 1..16: note = Antisense oligonucleotide
  modified_base 15..16: mod_base = OTHER; note = misc_feature - bicyclic nucleic acid scaffold modification
  source 1..16: mol_type = other RNA
tatttagcatgttccc

SEQ ID NO: 200 - RNA, 21 nt, synthetic construct
  misc_feature 1..21: note = Antisense oligonucleotide
  source 1..21: mol_type = other RNA
tctcaggaatttgtgtctttc

SEQ ID NO: 201 - RNA, 21 nt, synthetic construct
  modified_base 1: mod_base = OTHER; note = thymine
  misc_feature 1..21: note = Antisense oligonucleotide
  modified_base 1: mod_base = OTHER; note = misc_feature - bicyclic nucleic acid scaffold modification
  source 1..21: mol_type = other RNA
tctcaggaatttgtgtctttc

SEQ ID NO: 202 - RNA, 21 nt, synthetic construct
  misc_feature 1..21: note = Antisense oligonucleotide
  modified_base 21: mod_base = OTHER; note = misc_feature - bicyclic nucleic acid scaffold modification
  source 1..21: mol_type = other RNA
tctcaggaatttgtgtctttc

SEQ ID NO: 203 - RNA, 21 nt, synthetic construct
  modified_base 1: mod_base = OTHER; note = thymine
  misc_feature 1..21: note = Antisense oligonucleotide
  modified_base 1: mod_base = OTHER; note = misc_feature - bicyclic nucleic acid scaffold modification
  modified_base 21: mod_base = OTHER; note = misc_feature - bicyclic nucleic acid scaffold modification
  source 1..21: mol_type = other RNA
tctcaggaatttgtgtctttc

SEQ ID NO: 204 - RNA, 21 nt, synthetic construct
  modified_base 1: mod_base = OTHER; note = thymine
  misc_feature 1..21: note = Antisense oligonucleotide
  modified_base 1..2: mod_base = OTHER; note = misc_feature - bicyclic nucleic acid scaffold modification
  source 1..21: mol_type = other RNA
tctcaggaatttgtgtctttc

SEQ ID NO: 205 - RNA, 21 nt, synthetic construct
  modified_base 20: mod_base = OTHER; note = thymine
  misc_feature 1..21: note = Antisense oligonucleotide
  modified_base 20..21: mod_base = OTHER; note = misc_feature - bicyclic nucleic acid scaffold modification
  source 1..21: mol_type = other RNA
tctcaggaatttgtgtctttc

SEQ ID NO: 206 - RNA, 18 nt, synthetic construct
  misc_feature 1..18: note = Antisense oligonucleotide
  source 1..18: mol_type = other RNA
tctcaggaatttgtgtct

SEQ ID NO: 207 - RNA, 18 nt, synthetic construct
  modified_base 1: mod_base = OTHER; note = thymine
  misc_feature 1..18: note = Antisense oligonucleotide
  modified_base 1: mod_base = OTHER; note = misc_feature - bicyclic nucleic acid scaffold modification
  source 1..18: mol_type = other RNA
tctcaggaatttgtgtct

SEQ ID NO: 208 - RNA, 18 nt, synthetic construct
  modified_base 18: mod_base = OTHER; note = thymine
  misc_feature 1..18: note = Antisense oligonucleotide
  modified_base 18: mod_base = OTHER; note = misc_feature - bicyclic nucleic acid scaffold modification
  source 1..18: mol_type = other RNA
tctcaggaatttgtgtct

SEQ ID NO: 209 - RNA, 18 nt, synthetic construct
  modified_base 1: mod_base = OTHER; note = thymine
  modified_base 18: mod_base = OTHER; note = thymine
  misc_feature 1..18: note = Antisense oligonucleotide
  modified_base 1: mod_base = OTHER; note = misc_feature - bicyclic nucleic acid scaffold modification
  modified_base 18: mod_base = OTHER; note = misc_feature - bicyclic nucleic acid scaffold modification
  source 1..18: mol_type = other RNA
tctcaggaatttgtgtct

SEQ ID NO: 210 - RNA, 18 nt, synthetic construct
  modified_base 1: mod_base = OTHER; note = thymine
  misc_feature 1..18: note = Antisense oligonucleotide
  modified_base 1..2: mod_base = OTHER; note = misc_feature - bicyclic nucleic acid scaffold modification
  source 1..18: mol_type = other RNA
tctcaggaatttgtgtct

SEQ ID NO: 211 - RNA, 18 nt, synthetic construct
  modified_base 18: mod_base = OTHER; note = thymine
  misc_feature 1..18: note = Antisense oligonucleotide
  modified_base 17..18: mod_base = OTHER; note = misc_feature - bicyclic nucleic acid scaffold modification
  source 1..18: mol_type = other RNA
tctcaggaatttgtgtct

SEQ ID NO: 212 - RNA, 16 nt, synthetic construct
  misc_feature 1..16: note = Antisense oligonucleotide
  source 1..16: mol_type = other RNA
tctcaggaatttgtgt

SEQ ID NO: 213 - RNA, 16 nt, synthetic construct
  modified_base 1: mod_base = OTHER; note = thymine
  misc_feature 1..16: note = Antisense oligonucleotide
  modified_base 1: mod_base = OTHER; note = misc_feature - bicyclic nucleic acid scaffold modification
  source 1..16: mol_type = other RNA
tctcaggaatttgtgt

SEQ ID NO: 214 - RNA, 16 nt, synthetic construct
  modified_base 16: mod_base = OTHER; note = thymine
  misc_feature 1..16: note = Antisense oligonucleotide
  modified_base 16: mod_base = OTHER; note = misc_feature - bicyclic nucleic acid scaffold modification
  source 1..16: mol_type = other RNA
tctcaggaatttgtgt

SEQ ID NO: 215 - RNA, 16 nt, synthetic construct
  modified_base 1: mod_base = OTHER; note = thymine
  modified_base 16: mod_base = OTHER; note = thymine
  misc_feature 1..16: note = Antisense oligonucleotide
  modified_base 1: mod_base = OTHER; note = misc_feature - bicyclic nucleic acid scaffold modification
  modified_base 16: mod_base = OTHER; note = misc_feature - bicyclic nucleic acid scaffold modification
  source 1..16: mol_type = other RNA
tctcaggaatttgtgt

SEQ ID NO: 216 - RNA, 16 nt, synthetic construct
  modified_base 1: mod_base = OTHER; note = thymine
  misc_feature 1..16: note = Antisense oligonucleotide
  modified_base 1..2: mod_base = OTHER; note = misc_feature - bicyclic nucleic acid scaffold modification
  source 1..16: mol_type = other RNA
tctcaggaatttgtgt

SEQ ID NO: 217 - RNA, 16 nt, synthetic construct
  modified_base 16: mod_base = OTHER; note = thymine
  misc_feature 1..16: note = Antisense oligonucleotide
  modified_base 15..16: mod_base = OTHER; note = misc_feature - bicyclic nucleic acid scaffold modification
  source 1..16: mol_type = other RNA
tctcaggaatttgtgt

SEQ ID NO: 218 - RNA, 18 nt, synthetic construct
  misc_feature 1..18: note = Antisense oligonucleotide
  source 1..18: mol_type = other RNA
caggaatttgtgtctttc

SEQ ID NO: 219 - RNA, 18 nt, synthetic construct
  misc_feature 1..18: note = Antisense oligonucleotide
  modified_base 1: mod_base = OTHER; note = misc_feature - bicyclic nucleic acid scaffold modification
  source 1..18: mol_type = other RNA
caggaatttgtgtctttc

SEQ ID NO: 220 - RNA, 18 nt, synthetic construct
  misc_feature 1..18: note = Antisense oligonucleotide
  modified_base 18: mod_base = OTHER; note = misc_feature - bicyclic nucleic acid scaffold modification
  source 1..18: mol_type = other RNA
caggaatttgtgtctttc

SEQ ID NO: 221 - RNA, 18 nt, synthetic construct
  misc_feature 1..18: note = Antisense oligonucleotide
  modified_base 1: mod_base = OTHER; note = misc_feature - bicyclic nucleic acid scaffold modification
  modified_base 18: mod_base = OTHER; note = misc_feature - bicyclic nucleic acid scaffold modification
  source 1..18: mol_type = other RNA
caggaatttgtgtctttc

SEQ ID NO: 222 - RNA, 18 nt, synthetic construct
  misc_feature 1..18: note = Antisense oligonucleotide
  modified_base 1..2: mod_base = OTHER; note = misc_feature - bicyclic nucleic acid scaffold modification
  source 1..18: mol_type = other RNA
caggaatttgtgtctttc

SEQ ID NO: 223 - RNA, 18 nt, synthetic construct
  modified_base 17: mod_base = OTHER; note = thymine
  misc_feature 1..18: note = Antisense oligonucleotide
  modified_base 17..18: mod_base = OTHER; note = misc_feature - bicyclic nucleic acid scaffold modification
  source 1..18: mol_type = other RNA
caggaatttgtgtctttc

SEQ ID NO: 224 - RNA, 16 nt, synthetic construct
  misc_feature 1..16: note = Antisense oligonucleotide
  source 1..16: mol_type = other RNA
ggaatttgtgtctttc

SEQ ID NO: 225 - RNA, 16 nt, synthetic construct
  misc_feature 1..16: note = Antisense oligonucleotide
  modified_base 1: mod_base = OTHER; note = misc_feature - bicyclic nucleic acid scaffold modification
  source 1..16: mol_type = other RNA
ggaatttgtgtctttc

SEQ ID NO: 226 - RNA, 16 nt, synthetic construct
  misc_feature 1..16: note = Antisense oligonucleotide
  modified_base 16: mod_base = OTHER; note = misc_feature - bicyclic nucleic acid scaffold modification
  source 1..16: mol_type = other RNA
ggaatttgtgtctttc

SEQ ID NO: 227 - RNA, 16 nt, synthetic construct
  misc_feature 1..16: note = Antisense oligonucleotide
  modified_base 1: mod_base = OTHER; note = misc_feature - bicyclic nucleic acid scaffold modification
  modified_base 16: mod_base = OTHER; note = misc_feature - bicyclic nucleic acid scaffold modification
  source 1..16: mol_type = other RNA
ggaatttgtgtctttc

SEQ ID NO: 228 - RNA, 16 nt, synthetic construct
  misc_feature 1..16: note = Antisense oligonucleotide
  modified_base 1..2: mod_base = OTHER; note = misc_feature - bicyclic nucleic acid scaffold modification
  source 1..16: mol_type = other RNA
ggaatttgtgtctttc

SEQ ID NO: 229 - RNA, 16 nt, synthetic construct
  modified_base 15: mod_base = OTHER; note = thymine
  misc_feature 1..16: note = Antisense oligonucleotide
  modified_base 15..16: mod_base = OTHER; note = misc_feature - bicyclic nucleic acid scaffold modification
  source 1..16: mol_type = other RNA
ggaatttgtgtctttc

SEQ ID NO: 230 - RNA, 23 nt, synthetic construct
  misc_feature 1..23: note = Antisense oligonucleotide
  source 1..23: mol_type = other RNA
gccatttctcaacagatctgtca

SEQ ID NO: 231 - RNA, 23 nt, synthetic construct
  misc_feature 1..23: note = Antisense oligonucleotide
  modified_base 1: mod_base = OTHER; note = misc_feature - bicyclic nucleic acid scaffold modification
  source 1..23: mol_type = other RNA
gccatttctcaacagatctgtca

SEQ ID NO: 232 - RNA, 23 nt, synthetic construct
  misc_feature 1..23: note = Antisense oligonucleotide
  modified_base 23: mod_base = OTHER; note = misc_feature - bicyclic nucleic acid scaffold modification
  source 1..23: mol_type = other RNA
gccatttctcaacagatctgtca

SEQ ID NO: 233 - RNA, 23 nt, synthetic construct
  misc_feature 1..23: note = Antisense oligonucleotide
  modified_base 1: mod_base = OTHER; note = misc_feature - bicyclic nucleic acid scaffold modification
  modified_base 23: mod_base = OTHER; note = misc_feature - bicyclic nucleic acid scaffold modification
  source 1..23: mol_type = other RNA
gccatttctcaacagatctgtca

SEQ ID NO: 234 - RNA, 23 nt, synthetic construct
  misc_feature 1..23: note = Antisense oligonucleotide
  modified_base 1..2: mod_base = OTHER; note = misc_feature - bicyclic nucleic acid scaffold modification
  source 1..23: mol_type = other RNA
gccatttctcaacagatctgtca

SEQ ID NO: 235 - RNA, 23 nt, synthetic construct
  misc_feature 1..23: note = Antisense oligonucleotide
  modified_base 22..23: mod_base = OTHER; note = misc_feature - bicyclic nucleic acid scaffold modification
  source 1..23: mol_type = other RNA
gccatttctcaacagatctgtca

SEQ ID NO: 236 - RNA, 20 nt, synthetic construct
  misc_feature 1..20: note = Antisense oligonucleotide
  source 1..20: mol_type = other RNA
atttctcaacagatctgtca

SEQ ID NO: 237 - RNA, 20 nt, synthetic construct
  misc_feature 1..20: note = Antisense oligonucleotide
  modified_base 1: mod_base = OTHER; note = misc_feature - bicyclic nucleic acid scaffold modification
  source 1..20: mol_type = other RNA
atttctcaacagatctgtca

SEQ ID NO: 238 - RNA, 20 nt, synthetic construct
  misc_feature 1..20: note = Antisense oligonucleotide
  modified_base 20: mod_base = OTHER; note = misc_feature - bicyclic nucleic acid scaffold modification
  source 1..20: mol_type = other RNA
atttctcaacagatctgtca

SEQ ID NO: 239 - RNA, 20 nt, synthetic construct
  misc_feature 1..20: note = Antisense oligonucleotide
  modified_base 1: mod_base = OTHER; note = misc_feature - bicyclic nucleic acid scaffold modification
  modified_base 20: mod_base = OTHER; note = misc_feature - bicyclic nucleic acid scaffold modification
  source 1..20: mol_type = other RNA
atttctcaacagatctgtca

SEQ ID NO: 240 - RNA, 20 nt, synthetic construct
  modified_base 2: mod_base = OTHER; note = thymine
  misc_feature 1..20: note = Antisense oligonucleotide
  modified_base 1..2: mod_base = OTHER; note = misc_feature - bicyclic nucleic acid scaffold modification
  source 1..20: mol_type = other RNA
atttctcaacagatctgtca

SEQ ID NO: 241 - RNA, 20 nt, synthetic construct
  misc_feature 1..20: note = Antisense oligonucleotide
  modified_base 19..20: mod_base = OTHER; note = misc_feature - bicyclic nucleic acid scaffold modification
  source 1..20: mol_type = other RNA
atttctcaacagatctgtca

SEQ ID NO: 242 - RNA, 18 nt, synthetic construct
  misc_feature 1..18: note = Antisense oligonucleotide
  source 1..18: mol_type = other RNA
ttctcaacagatctgtca

SEQ ID NO: 243 - RNA, 18 nt, synthetic construct
  modified_base 1: mod_base = OTHER; note = thymine
  misc_feature 1..18: note = Antisense oligonucleotide
  modified_base 1: mod_base = OTHER; note = misc_feature - bicyclic nucleic acid scaffold modification
  source 1..18: mol_type = other RNA
ttctcaacagatctgtca

SEQ ID NO: 244 - RNA, 18 nt, synthetic construct
  misc_feature 1..18: note = Antisense oligonucleotide
  modified_base 18: mod_base = OTHER; note = misc_feature - bicyclic nucleic acid scaffold modification
  source 1..18: mol_type = other RNA
ttctcaacagatctgtca

SEQ ID NO: 245 - RNA, 18 nt, synthetic construct
  modified_base 1: mod_base = OTHER; note = thymine
  misc_feature 1..18: note = Antisense oligonucleotide
  modified_base 1: mod_base = OTHER; note = misc_feature - bicyclic nucleic acid scaffold modification
  modified_base 18: mod_base = OTHER; note = misc_feature - bicyclic nucleic acid scaffold modification
  source 1..18: mol_type = other RNA
ttctcaacagatctgtca

SEQ ID NO: 246 - RNA, 18 nt, synthetic construct
  modified_base 1..2: mod_base = OTHER; note = thymine
  misc_feature 1..18: note = Antisense oligonucleotide
  modified_base 1..2: mod_base = OTHER; note = misc_feature - bicyclic nucleic acid scaffold modification
  source 1..18: mol_type = other RNA
ttctcaacagatctgtca

SEQ ID NO: 247 - RNA, 18 nt, synthetic construct
  misc_feature 1..18: note = Antisense oligonucleotide
  modified_base 17..18: mod_base = OTHER; note = misc_feature - bicyclic nucleic acid scaffold modification
  source 1..18: mol_type = other RNA
ttctcaacagatctgtca

SEQ ID NO: 248 - RNA, 16 nt, synthetic construct
  misc_feature 1..16: note = Antisense oligonucleotide
  source 1..16: mol_type = other RNA
ctcaacagatctgtca

SEQ ID NO: 249 - RNA, 16 nt, synthetic construct
  misc_feature 1..16: note = Antisense oligonucleotide
  modified_base 1: mod_base = OTHER; note = misc_feature - bicyclic nucleic acid scaffold modification
  source 1..16: mol_type = other RNA
ctcaacagatctgtca

SEQ ID NO: 250 - RNA, 16 nt, synthetic construct
  misc_feature 1..16: note = Antisense oligonucleotide
  modified_base 16: mod_base = OTHER; note = misc_feature - bicyclic nucleic acid scaffold modification
  source 1..16: mol_type = other RNA
ctcaacagatctgtca

SEQ ID NO: 251 - RNA, 16 nt, synthetic construct
  misc_feature 1..16: note = Antisense oligonucleotide
  modified_base 1: mod_base = OTHER; note = misc_feature - bicyclic nucleic acid scaffold modification
  modified_base 16: mod_base = OTHER; note = misc_feature - bicyclic nucleic acid scaffold modification
  source 1..16: mol_type = other RNA
ctcaacagatctgtca

SEQ ID NO: 252 - RNA, 16 nt, synthetic construct
  modified_base 2: mod_base = OTHER; note = thymine
  misc_feature 1..16: note = Antisense oligonucleotide
  modified_base 1..2: mod_base = OTHER; note = misc_feature - bicyclic nucleic acid scaffold modification
  source 1..16: mol_type = other RNA
ctcaacagatctgtca

SEQ ID NO: 253 - RNA, 16 nt, synthetic construct
  misc_feature 1..16: note = Antisense oligonucleotide
  modified_base 15..16: mod_base = OTHER; note = misc_feature - bicyclic nucleic acid scaffold modification
  source 1..16: mol_type = other RNA
ctcaacagatctgtca

SEQ ID NO: 254 - RNA, 20 nt, synthetic construct
  misc_feature 1..20: note = Antisense oligonucleotide
  source 1..20: mol_type = other RNA
gccatttctcaacagatctg

SEQ ID NO: 255 - RNA, 20 nt, synthetic construct
  misc_feature 1..20: note = Antisense oligonucleotide
  modified_base 1: mod_base = OTHER; note = misc_feature - bicyclic nucleic acid scaffold modification
  source 1..20: mol_type = other RNA
gccatttctcaacagatctg

SEQ ID NO: 256 - RNA, 20 nt, synthetic construct
  misc_feature 1..20: note = Antisense oligonucleotide
  modified_base 20: mod_base = OTHER; note = misc_feature - bicyclic nucleic acid scaffold modification
  source 1..20: mol_type = other RNA
gccatttctcaacagatctg

SEQ ID NO: 257 - RNA, 20 nt, synthetic construct
  misc_feature 1..20: note = Antisense oligonucleotide
  modified_base 1: mod_base = OTHER; note = misc_feature - bicyclic nucleic acid scaffold modification
  modified_base 20: mod_base = OTHER; note = misc_feature - bicyclic nucleic acid scaffold modification
  source 1..20: mol_type = other RNA
gccatttctcaacagatctg

SEQ ID NO: 258 - RNA, 20 nt, synthetic construct
  misc_feature 1..20: note = Antisense oligonucleotide
  modified_base 1..2: mod_base = OTHER; note = misc_feature - bicyclic nucleic acid scaffold modification
  source 1..20: mol_type = other RNA
gccatttctcaacagatctg

SEQ ID NO: 259 - RNA, 20 nt, synthetic construct
  modified_base 19: mod_base = OTHER; note = thymine
  misc_feature 1..20: note = Antisense oligonucleotide
  modified_base 19..20: mod_base = OTHER; note = misc_feature - bicyclic nucleic acid scaffold modification
  source 1..20: mol_type = other RNA
gccatttctcaacagatctg

SEQ ID NO: 260 - RNA, 18 nt, synthetic construct
  misc_feature 1..18: note = Antisense oligonucleotide
  source 1..18: mol_type = other RNA
gccatttctcaacagatc

SEQ ID NO: 261 - RNA, 18 nt, synthetic construct
  misc_feature 1..18: note = Antisense oligonucleotide
  modified_base 1: mod_base = OTHER; note = misc_feature - bicyclic nucleic acid scaffold modification
  source 1..18: mol_type = other RNA
gccatttctcaacagatc

SEQ ID NO: 262 - RNA, 18 nt, synthetic construct
  misc_feature 1..18: note = Antisense oligonucleotide
  modified_base 18: mod_base = OTHER; note = misc_feature - bicyclic nucleic acid scaffold modification
  source 1..18: mol_type = other RNA
gccatttctcaacagatc

SEQ ID NO: 263 - RNA, 18 nt, synthetic construct
  misc_feature 1..18: note = Antisense oligonucleotide
  modified_base 1: mod_base = OTHER; note = misc_feature - bicyclic nucleic acid scaffold modification
  modified_base 18: mod_base = OTHER; note = misc_feature - bicyclic nucleic acid scaffold modification
  source 1..18: mol_type = other RNA
gccatttctcaacagatc

SEQ ID NO: 264 - RNA, 18 nt, synthetic construct
  misc_feature 1..18: note = Antisense oligonucleotide
  modified_base 1..2: mod_base = OTHER; note = misc_feature - bicyclic nucleic acid scaffold modification
  source 1..18: mol_type = other RNA
gccatttctcaacagatc

SEQ ID NO: 265 - RNA, 18 nt, synthetic construct
  modified_base 17: mod_base = OTHER; note = thymine
  misc_feature 1..18: note = Antisense oligonucleotide
  modified_base 17..18: mod_base = OTHER; note = misc_feature - bicyclic nucleic acid scaffold modification
  source 1..18: mol_type = other RNA
gccatttctcaacagatc

SEQ ID NO: 266 - RNA, 16 nt, synthetic construct
  misc_feature 1..16: note = Antisense oligonucleotide
  source 1..16: mol_type = other RNA
gccatttctcaacaga

SEQ ID NO: 267 - RNA, 16 nt, synthetic construct
  misc_feature 1..16: note = Antisense oligonucleotide
  modified_base 1: mod_base = OTHER; note = misc_feature - bicyclic nucleic acid scaffold modification
  source 1..16: mol_type = other RNA
gccatttctcaacaga

SEQ ID NO: 268 - RNA, 16 nt, synthetic construct
  misc_feature 1..16: note = Antisense oligonucleotide
  modified_base 16: mod_base = OTHER; note = misc_feature - bicyclic nucleic acid scaffold modification
  source 1..16: mol_type = other RNA
gccatttctcaacaga

SEQ ID NO: 269 - RNA, 16 nt, synthetic construct
  misc_feature 1..16: note = Antisense oligonucleotide
  modified_base 1: mod_base = OTHER; note = misc_feature - bicyclic nucleic acid scaffold modification
  modified_base 16: mod_base = OTHER; note = misc_feature - bicyclic nucleic acid scaffold modification
  source 1..16: mol_type = other RNA
gccatttctcaacaga

SEQ ID NO: 270 - RNA, 16 nt, synthetic construct
  misc_feature 1..16: note = Antisense oligonucleotide
  modified_base 1..2: mod_base = OTHER; note = misc_feature - bicyclic nucleic acid scaffold modification
  source 1..16: mol_type = other RNA
gccatttctcaacaga

SEQ ID NO: 271 - RNA, 16 nt, synthetic construct
  misc_feature 1..16: note = Antisense oligonucleotide
  modified_base 15..16: mod_base = OTHER; note = misc_feature - bicyclic nucleic acid scaffold modification
  source 1..16: mol_type = other RNA
gccatttctcaacaga

SEQ ID NO: 272 - RNA, 23 nt, synthetic construct
  misc_feature 1..23: note = Antisense oligonucleotide
  source 1..23: mol_type = other RNA
tgcccaatgccatcctggagttc

SEQ ID NO: 273 - RNA, 23 nt, synthetic construct
  modified_base 1: mod_base = OTHER; note = thymine
  misc_feature 1..23: note = Antisense oligonucleotide
  modified_base 1: mod_base = OTHER; note = misc_feature - bicyclic nucleic acid scaffold modification
  source 1..23: mol_type = other RNA
tgcccaatgccatcctggagttc

SEQ ID NO: 274 - RNA, 23 nt, synthetic construct
  misc_feature 1..23: note = Antisense oligonucleotide
  modified_base 23: mod_base = OTHER; note = misc_feature - bicyclic nucleic acid scaffold modification
  source 1..23: mol_type = other RNA
tgcccaatgccatcctggagttc

SEQ ID NO: 275 - RNA, 23 nt, synthetic construct
  modified_base 1: mod_base = OTHER; note = thymine
  misc_feature 1..23: note = Antisense oligonucleotide
  modified_base 1: mod_base = OTHER; note = misc_feature - bicyclic nucleic acid scaffold modification
  modified_base 23: mod_base = OTHER; note = misc_feature - bicyclic nucleic acid scaffold modification
  source 1..23: mol_type = other RNA
tgcccaatgccatcctggagttc

SEQ ID NO: 276 - RNA, 23 nt, synthetic construct
  modified_base 1: mod_base = OTHER; note = thymine
  misc_feature 1..23: note = Antisense oligonucleotide
  modified_base 1..2: mod_base = OTHER; note = misc_feature - bicyclic nucleic acid scaffold modification
  source 1..23: mol_type = other RNA
tgcccaatgccatcctggagttc

SEQ ID NO: 277 - RNA, 23 nt, synthetic construct
  modified_base 22: mod_base = OTHER; note = thymine
  misc_feature 1..23: note = Antisense oligonucleotide
  modified_base 22..23: mod_base = OTHER; note = misc_feature - bicyclic nucleic acid scaffold modification
  source 1..23: mol_type = other RNA
tgcccaatgccatcctggagttc

SEQ ID NO: 278 - RNA, 20 nt, synthetic construct
  misc_feature 1..20: note = Antisense oligonucleotide
  source 1..20: mol_type = other RNA
tgcccaatgccatcctggag

SEQ ID NO: 279 - RNA, 20 nt, synthetic construct
  modified_base 1: mod_base = OTHER; note = thymine
  misc_feature 1..20: note = Antisense oligonucleotide
  modified_base 1: mod_base = OTHER; note = misc_feature - bicyclic nucleic acid scaffold modification
  source 1..20: mol_type = other RNA
tgcccaatgccatcctggag

SEQ ID NO: 280 - RNA, 20 nt, synthetic construct
  misc_feature 1..20: note = Antisense oligonucleotide
  modified_base 20: mod_base = OTHER; note = misc_feature - bicyclic nucleic acid scaffold modification
  source 1..20: mol_type = other RNA
tgcccaatgccatcctggag

SEQ ID NO: 281 - RNA, 20 nt, synthetic construct
  modified_base 1: mod_base = OTHER; note = thymine
  misc_feature 1..20: note = Antisense oligonucleotide
  modified_base 1: mod_base = OTHER; note = misc_feature - bicyclic nucleic acid scaffold modification
  modified_base 20: mod_base = OTHER; note = misc_feature - bicyclic nucleic acid scaffold modification
  source 1..20: mol_type = other RNA
tgcccaatgccatcctggag

SEQ ID NO: 282 - RNA, 20 nt, synthetic construct
  modified_base 1: mod_base = OTHER; note = thymine
  misc_feature 1..20: note = Antisense oligonucleotide
  modified_base 1..2: mod_base = OTHER; note = misc_feature - bicyclic nucleic acid scaffold modification
  source 1..20: mol_type = other RNA
tgcccaatgccatcctggag

SEQ ID NO: 283 - RNA, 20 nt, synthetic construct
  misc_feature 1..20: note = Antisense oligonucleotide
  modified_base 19..20: mod_base = OTHER; note = misc_feature - bicyclic nucleic acid scaffold modification
  source 1..20: mol_type = other RNA
tgcccaatgccatcctggag

SEQ ID NO: 284 - RNA, 18 nt, synthetic construct
  misc_feature 1..18: note = Antisense oligonucleotide
  source 1..18: mol_type = other RNA
tgcccaatgccatcctgg

SEQ ID NO: 285 - RNA, 18 nt, synthetic construct
  modified_base 1: mod_base = OTHER; note = thymine
  misc_feature 1..18: note = Antisense oligonucleotide
  modified_base 1: mod_base = OTHER; note = misc_feature - bicyclic nucleic acid scaffold modification
  source 1..18: mol_type = other RNA
tgcccaatgccatcctgg

SEQ ID NO: 286 - RNA, 18 nt, synthetic construct
  misc_feature 1..18: note = Antisense oligonucleotide
  modified_base 18: mod_base = OTHER; note = misc_feature - bicyclic nucleic acid scaffold modification
  source 1..18: mol_type = other RNA
tgcccaatgccatcctgg

SEQ ID NO: 287 - RNA, 18 nt, synthetic construct
  modified_base 1: mod_base = OTHER; note = thymine
  misc_feature 1..18: note = Antisense oligonucleotide
  modified_base 1: mod_base = OTHER; note = misc_feature - bicyclic nucleic acid scaffold modification
  modified_base 18: mod_base = OTHER; note = misc_feature - bicyclic nucleic acid scaffold modification
  source 1..18: mol_type = other RNA
tgcccaatgccatcctgg

SEQ ID NO: 288 - RNA, 18 nt, synthetic construct
  modified_base 1: mod_base = OTHER; note = thymine
  misc_feature 1..18: note = Antisense oligonucleotide
  modified_base 1..2: mod_base = OTHER; note = misc_feature - bicyclic nucleic acid scaffold modification
  source 1..18: mol_type = other RNA
tgcccaatgccatcctgg

SEQ ID NO: 289 - RNA, 18 nt, synthetic construct
  misc_feature 1..18: note = Antisense oligonucleotide
  modified_base 17..18: mod_base = OTHER; note = misc_feature - bicyclic nucleic acid scaffold modification
  source 1..18: mol_type = other RNA
tgcccaatgccatcctgg

SEQ ID NO: 290 - RNA, 16 nt, synthetic construct
  misc_feature 1..16: note = Antisense oligonucleotide
  source 1..16: mol_type = other RNA
tgcccaatgccatcct

SEQ ID NO: 291 - RNA, 16 nt, synthetic construct
  modified_base 1: mod_base = OTHER; note = thymine
  misc_feature 1..16: note = Antisense oligonucleotide
  modified_base 1: mod_base = OTHER; note = misc_feature - bicyclic nucleic acid scaffold modification
  source 1..16: mol_type = other RNA
tgcccaatgccatcct

SEQ ID NO: 292 - RNA, 16 nt, synthetic construct
  modified_base 16: mod_base = OTHER; note = thymine
  misc_feature 1..16: note = Antisense oligonucleotide
  modified_base 16: mod_base = OTHER; note = misc_feature - bicyclic nucleic acid scaffold modification
  source 1..16: mol_type = other RNA
tgcccaatgccatcct

SEQ ID NO: 293 - RNA, 16 nt, synthetic construct
  modified_base 1: mod_base = OTHER; note = thymine
  modified_base 16: mod_base = OTHER; note = thymine
  misc_feature 1..16: note = Antisense oligonucleotide
  modified_base 1: mod_base = OTHER; note = misc_feature - bicyclic nucleic acid scaffold modification
  modified_base 16: mod_base = OTHER; note = misc_feature - bicyclic nucleic acid scaffold modification
  source 1..16: mol_type = other RNA
tgcccaatgccatcct

SEQ ID NO: 294 - RNA, 16 nt, synthetic construct
  modified_base 1: mod_base = OTHER; note = thymine
  misc_feature 1..16: note = Antisense oligonucleotide
  modified_base 1..2: mod_base = OTHER; note = misc_feature - bicyclic nucleic acid scaffold modification
  source 1..16: mol_type = other RNA
tgcccaatgccatcct

SEQ ID NO: 295 - RNA, 16 nt, synthetic construct
  modified_base 16: mod_base = OTHER; note = thymine
  misc_feature 1..16: note = Antisense oligonucleotide
  modified_base 15..16: mod_base = OTHER; note = misc_feature - bicyclic nucleic acid scaffold modification
  source 1..16: mol_type = other RNA
tgcccaatgccatcct

SEQ ID NO: 296 - RNA, 20 nt, synthetic construct
  misc_feature 1..20: note = Antisense oligonucleotide
  source 1..20: mol_type = other RNA
ccaatgccatcctggagttc

SEQ ID NO: 297 - RNA, 20 nt, synthetic construct
  misc_feature 1..20: note = Antisense oligonucleotide
  modified_base 1: mod_base = OTHER; note = misc_feature - bicyclic nucleic acid scaffold modification
  source 1..20: mol_type = other RNA
ccaatgccatcctggagttc

SEQ ID NO: 298 - RNA, 20 nt, synthetic construct
  misc_feature 1..20: note = Antisense oligonucleotide
  modified_base 20: mod_base = OTHER; note = misc_feature - bicyclic nucleic acid scaffold modification
  source 1..20: mol_type = other RNA
ccaatgccatcctggagttc

SEQ ID NO: 299 - RNA, 20 nt, synthetic construct
  misc_feature 1..20: note = Antisense oligonucleotide
  modified_base 1: mod_base = OTHER; note = misc_feature - bicyclic nucleic acid scaffold modification
  modified_base 20: mod_base = OTHER; note = misc_feature - bicyclic nucleic acid scaffold modification
  source 1..20: mol_type = other RNA
ccaatgccatcctggagttc

SEQ ID NO: 300 - RNA, 20 nt, synthetic construct
  misc_feature 1..20: note = Antisense oligonucleotide
  modified_base 1..2: mod_base = OTHER; note = misc_feature - bicyclic nucleic acid scaffold modification
  source 1..20: mol_type = other RNA
ccaatgccatcctggagttc

SEQ ID NO: 301 - RNA, 20 nt, synthetic construct
  modified_base 19: mod_base = OTHER; note = thymine
  misc_feature 1..20: note = Antisense oligonucleotide
  modified_base 19..20: mod_base = OTHER; note = misc_feature - bicyclic nucleic acid scaffold modification
  source 1..20: mol_type = other RNA
ccaatgccatcctggagttc

SEQ ID NO: 302 - RNA, 18 nt, synthetic construct
  misc_feature 1..18: note = Antisense oligonucleotide
  source 1..18: mol_type = other RNA
aatgccatcctggagttc

SEQ ID NO: 303 - RNA, 18 nt, synthetic construct
  misc_feature 1..18: note = Antisense oligonucleotide
  modified_base 1: mod_base = OTHER; note = misc_feature - bicyclic nucleic acid scaffold modification
  source 1..18: mol_type = other RNA
aatgccatcctggagttc

SEQ ID NO: 304 - RNA, 18 nt, synthetic construct
  misc_feature 1..18: note = Antisense oligonucleotide
  modified_base 18: mod_base = OTHER; note = misc_feature - bicyclic nucleic acid scaffold modification
  source 1..18: mol_type = other RNA
aatgccatcctggagttc

SEQ ID NO: 305 - RNA, 18 nt, synthetic construct
  misc_feature 1..18: note = Antisense oligonucleotide
  modified_base 1: mod_base = OTHER; note = misc_feature - bicyclic nucleic acid scaffold modification
  modified_base 18: mod_base = OTHER; note = misc_feature - bicyclic nucleic acid scaffold modification
  source 1..18: mol_type = other RNA
aatgccatcctggagttc

SEQ ID NO: 306 - RNA, 18 nt, synthetic construct
  misc_feature 1..18: note = Antisense oligonucleotide
  modified_base 1..2: mod_base = OTHER; note = misc_feature - bicyclic nucleic acid scaffold modification
  source 1..18: mol_type = other RNA
aatgccatcctggagttc

SEQ ID NO: 307 - RNA, 18 nt, synthetic construct
  modified_base 17: mod_base = OTHER; note = thymine
  misc_feature 1..18: note = Antisense oligonucleotide
  modified_base 17..18: mod_base = OTHER; note = misc_feature - bicyclic nucleic acid scaffold modification
  source 1..18: mol_type = other RNA
aatgccatcctggagttc

SEQ ID NO: 308 - RNA, 16 nt, synthetic construct
  misc_feature 1..16: note = Antisense oligonucleotide
  source 1..16: mol_type = other RNA
tgccatcctggagttc

SEQ ID NO: 309 - RNA, 16 nt, synthetic construct
  modified_base 1: mod_base = OTHER; note = thymine
  misc_feature 1..16: note = Antisense oligonucleotide
  modified_base 1: mod_base = OTHER; note = misc_feature - bicyclic nucleic acid scaffold modification
  source 1..16: mol_type = other RNA
tgccatcctggagttc

SEQ ID NO: 310 - RNA, 16 nt, synthetic construct
  misc_feature 1..16: note = Antisense oligonucleotide
  modified_base 16: mod_base = OTHER; note = misc_feature - bicyclic nucleic acid scaffold modification
  source 1..16: mol_type = other RNA
tgccatcctggagttc

SEQ ID NO: 311 - RNA, 16 nt, synthetic construct
  modified_base 1: mod_base = OTHER; note = thymine
  misc_feature 1..16: note = Antisense oligonucleotide
  modified_base 1: mod_base = OTHER; note = misc_feature - bicyclic nucleic acid scaffold modification
  modified_base 16: mod_base = OTHER; note = misc_feature - bicyclic nucleic acid scaffold modification
  source 1..16: mol_type = other RNA
tgccatcctggagttc

SEQ ID NO: 312 - RNA, 16 nt, synthetic construct
  modified_base 1: mod_base = OTHER; note = thymine
  misc_feature 1..16: note = Antisense oligonucleotide
  modified_base 1..2: mod_base = OTHER; note = misc_feature - bicyclic nucleic acid scaffold modification
  source 1..16: mol_type = other RNA
tgccatcctggagttc

SEQ ID NO: 313 - RNA, 16 nt, synthetic construct
  modified_base 15: mod_base = OTHER; note = thymine
  misc_feature 1..16: note = Antisense oligonucleotide
  modified_base 15..16: mod_base = OTHER; note = misc_feature - bicyclic nucleic acid scaffold modification
  source 1..16: mol_type = other RNA
tgccatcctggagttc

SEQ ID NO: 314 - RNA, 18 nt, synthetic construct
  misc_feature 1..18: note = Antisense oligonucleotide
  source 1..18: mol_type = other RNA
ccaatgccatcctggagt

SEQ ID NO: 315 - RNA, 18 nt, synthetic construct
  misc_feature 1..18: note = Antisense oligonucleotide
  modified_base 1: mod_base = OTHER; note = misc_feature - bicyclic nucleic acid scaffold modification
  source 1..18: mol_type = other RNA
ccaatgccatcctggagt

SEQ ID NO: 316 - RNA, 18 nt, synthetic construct
  modified_base 18: mod_base = OTHER; note = thymine
  misc_feature 1..18: note = Antisense oligonucleotide
  modified_base 18: mod_base = OTHER; note = misc_feature - bicyclic nucleic acid scaffold modification
  source 1..18: mol_type = other RNA
ccaatgccatcctggagt

SEQ ID NO: 317 - RNA, 18 nt, synthetic construct
  modified_base 18: mod_base = OTHER; note = thymine
  misc_feature 1..18: note = Antisense oligonucleotide
  modified_base 1: mod_base = OTHER; note = misc_feature - bicyclic nucleic acid scaffold modification
  modified_base 18: mod_base = OTHER; note = misc_feature - bicyclic nucleic acid scaffold modification
  source 1..18: mol_type = other RNA
ccaatgccatcctggagt

SEQ ID NO: 318 - RNA, 18 nt, synthetic construct
  misc_feature 1..18: note = Antisense oligonucleotide
  modified_base 1..2: mod_base = OTHER; note = misc_feature - bicyclic nucleic acid scaffold modification
  source 1..18: mol_type = other RNA
ccaatgccatcctggagt

SEQ ID NO: 319 - RNA, 18 nt, synthetic construct
  modified_base 18: mod_base = OTHER; note = thymine
  misc_feature 1..18: note = Antisense oligonucleotide
  modified_base 17..18: mod_base = OTHER; note = misc_feature - bicyclic nucleic acid scaffold modification
  source 1..18: mol_type = other RNA
ccaatgccatcctggagt

SEQ ID NO: 320 - RNA, 22 nt, synthetic construct
  misc_feature 1..22: note = Antisense oligonucleotide
  source 1..22: mol_type = other RNA
ccagttgcattcaatgttctga

SEQ ID NO: 321 - RNA, 22 nt, synthetic construct
  misc_feature 1..22: note = Antisense oligonucleotide
  modified_base 1: mod_base = OTHER; note = misc_feature - bicyclic nucleic acid scaffold modification
  source 1..22: mol_type = other RNA
ccagttgcattcaatgttctga

SEQ ID NO: 322 - RNA, 22 nt, synthetic construct
  misc_feature 1..22: note = Antisense oligonucleotide
  modified_base 22: mod_base = OTHER; note = misc_feature - bicyclic nucleic acid scaffold modification
  source 1..22: mol_type = other RNA
ccagttgcattcaatgttctga

SEQ ID NO: 323 - RNA, 22 nt, synthetic construct
  misc_feature 1..22: note = Antisense oligonucleotide
  modified_base 1: mod_base = OTHER; note = misc_feature - bicyclic nucleic acid scaffold modification
  modified_base 22: mod_base = OTHER; note = misc_feature - bicyclic nucleic acid scaffold modification
  source 1..22: mol_type = other RNA
ccagttgcattcaatgttctga

SEQ ID NO: 324 - RNA, 22 nt, synthetic construct
  misc_feature 1..22: note = Antisense oligonucleotide
  modified_base 1..2: mod_base = OTHER; note = misc_feature - bicyclic nucleic acid scaffold modification
  source 1..22: mol_type = other RNA
ccagttgcattcaatgttctga

SEQ ID NO: 325 - RNA, 22 nt, synthetic construct
  misc_feature 1..22: note = Antisense oligonucleotide
  modified_base 21..22: mod_base = OTHER; note = misc_feature - bicyclic nucleic acid scaffold modification
  source 1..22: mol_type = other RNA
ccagttgcattcaatgttctga

SEQ ID NO: 326 - RNA, 20 nt, synthetic construct
  misc_feature 1..20: note = Antisense oligonucleotide
  source 1..20: mol_type = other RNA
ccagttgcattcaatgttct

SEQ ID NO: 327 - RNA, 20 nt, synthetic construct
  misc_feature 1..20: note = Antisense oligonucleotide
  modified_base 1: mod_base = OTHER; note = misc_feature - bicyclic nucleic acid scaffold modification
  source 1..20: mol_type = other RNA
ccagttgcattcaatgttct

SEQ ID NO: 328 - RNA, 20 nt, synthetic construct
  modified_base 20: mod_base = OTHER; note = thymine
  misc_feature 1..20: note = Antisense oligonucleotide
  modified_base 20: mod_base = OTHER; note = misc_feature - bicyclic nucleic acid scaffold modification
  source 1..20: mol_type = other RNA
ccagttgcattcaatgttct

SEQ ID NO: 329 - RNA, 20 nt, synthetic construct
  modified_base 20: mod_base = OTHER; note = thymine
  misc_feature 1..20: note = Antisense oligonucleotide
  modified_base 1: mod_base = OTHER; note = misc_feature - bicyclic nucleic acid scaffold modification
  modified_base 20: mod_base = OTHER; note = misc_feature - bicyclic nucleic acid scaffold modification
  source 1..20: mol_type = other RNA
ccagttgcattcaatgttct

SEQ ID NO: 330 - RNA, 20 nt, synthetic construct
  misc_feature 1..20: note = Antisense oligonucleotide
  modified_base 1..2: mod_base = OTHER; note = misc_feature - bicyclic nucleic acid scaffold modification
  source 1..20: mol_type = other RNA
ccagttgcattcaatgttct

SEQ ID NO: 331 - RNA, 20 nt, synthetic construct
  modified_base 20: mod_base = OTHER; note = thymine
  misc_feature 1..20: note = Antisense oligonucleotide
  modified_base 19..20: mod_base = OTHER; note = misc_feature - bicyclic nucleic acid scaffold modification
  source 1..20: mol_type = other RNA
ccagttgcattcaatgttct

SEQ ID NO: 332 - RNA, 18 nt, synthetic construct
  misc_feature 1..18: note = Antisense oligonucleotide
  source 1..18: mol_type = other RNA
ccagttgcattcaatgtt

SEQ ID NO: 333 - RNA, 18 nt, synthetic construct
  misc_feature 1..18: note = Antisense oligonucleotide
  modified_base 1: mod_base = OTHER; note = misc_feature - bicyclic nucleic acid scaffold modification
  source 1..18: mol_type = other RNA
ccagttgcattcaatgtt

SEQ ID NO: 334 - RNA, 18 nt, synthetic construct
  modified_base 18: mod_base = OTHER; note = thymine
  misc_feature 1..18: note = Antisense oligonucleotide
  modified_base 18: mod_base = OTHER; note = misc_feature - bicyclic nucleic acid scaffold modification
  source 1..18: mol_type = other RNA
ccagttgcattcaatgtt

SEQ ID NO: 335 - RNA, 18 nt, synthetic construct
  modified_base 18: mod_base = OTHER; note = thymine
  misc_feature 1..18: note = Antisense oligonucleotide
  modified_base 1: mod_base = OTHER; note = misc_feature - bicyclic nucleic acid scaffold modification
  modified_base 18: mod_base = OTHER; note = misc_feature - bicyclic nucleic acid scaffold modification
  source 1..18: mol_type = other RNA
ccagttgcattcaatgtt

SEQ ID NO: 336 - RNA, 18 nt, synthetic construct
  misc_feature 1..18: note = Antisense oligonucleotide
  modified_base 1..2: mod_base = OTHER; note = misc_feature - bicyclic nucleic acid scaffold modification
  source 1..18: mol_type = other RNA
ccagttgcattcaatgtt

SEQ ID NO: 337 - RNA, 18 nt, synthetic construct
  modified_base 17..18: mod_base = OTHER; note = thymine
  misc_feature 1..18: note = Antisense oligonucleotide
  modified_base 17..18: mod_base = OTHER; note = misc_feature - bicyclic nucleic acid scaffold modification
  source 1..18: mol_type = other RNA
ccagttgcattcaatgtt

SEQ ID NO: 338 - RNA, 16 nt, synthetic construct
  misc_feature 1..16: note = Antisense oligonucleotide
  source 1..16: mol_type = other RNA
ccagttgcattcaatg

SEQ ID NO: 339 - RNA, 16 nt, synthetic construct
  misc_feature 1..16: note = Antisense oligonucleotide
  modified_base 1: mod_base = OTHER; note = misc_feature - bicyclic nucleic acid scaffold modification
  source 1..16: mol_type = other RNA
ccagttgcattcaatg

SEQ ID NO: 340 - RNA, 16 nt, synthetic construct
  misc_feature 1..16: note = Antisense oligonucleotide
  modified_base 16: mod_base = OTHER; note = misc_feature - bicyclic nucleic acid scaffold modification
  source 1..16: mol_type = other RNA
ccagttgcattcaatg

SEQ ID NO: 341 - RNA, 16 nt, synthetic construct
  misc_feature 1..16: note = Antisense oligonucleotide
  modified_base 1: mod_base = OTHER; note = misc_feature - bicyclic nucleic acid scaffold modification
  modified_base 16: mod_base = OTHER; note = misc_feature - bicyclic nucleic acid scaffold modification
  source 1..16: mol_type = other RNA
ccagttgcattcaatg

SEQ ID NO: 342 - RNA, 16 nt, synthetic construct
  misc_feature 1..16: note = Antisense oligonucleotide
  modified_base 1..2: mod_base = OTHER; note = misc_feature - bicyclic nucleic acid scaffold modification
  source 1..16: mol_type = other RNA
ccagttgcattcaatg

SEQ ID NO: 343 - RNA, 16 nt, synthetic construct
  modified_base 15: mod_base = OTHER; note = thymine
  misc_feature 1..16: note = Antisense oligonucleotide
  modified_base 15..16: mod_base = OTHER; note = misc_feature - bicyclic nucleic acid scaffold modification
  source 1..16: mol_type = other RNA
ccagttgcattcaatg

SEQ ID NO: 344 - RNA, 20 nt, synthetic construct
  misc_feature 1..20: note = Antisense oligonucleotide
  source 1..20: mol_type = other RNA
agttgcattcaatgttctga

SEQ ID NO: 345 - RNA, 20 nt, synthetic construct
  misc_feature 1..20: note = Antisense oligonucleotide
  modified_base 1: mod_base = OTHER; note = misc_feature - bicyclic nucleic acid scaffold modification
  source 1..20: mol_type = other RNA
agttgcattcaatgttctga

SEQ ID NO: 346 - RNA, 20 nt, synthetic construct
  misc_feature 1..20: note = Antisense oligonucleotide
  modified_base 20: mod_base = OTHER; note = misc_feature - bicyclic nucleic acid scaffold modification
  source 1..20: mol_type = other RNA
agttgcattcaatgttctga

SEQ ID NO: 347 - RNA, 20 nt, synthetic construct
  misc_feature 1..20: note = Antisense oligonucleotide
  modified_base 1: mod_base = OTHER; note = misc_feature - bicyclic nucleic acid scaffold modification
  modified_base 20: mod_base = OTHER; note = misc_feature - bicyclic nucleic acid scaffold modification
  source 1..20: mol_type = other RNA
agttgcattcaatgttctga

SEQ ID NO: 348 - RNA, 20 nt, synthetic construct
  misc_feature 1..20: note = Antisense oligonucleotide
  modified_base 1..2: mod_base = OTHER; note = misc_feature - bicyclic nucleic acid scaffold modification
  source 1..20: mol_type = other RNA
agttgcattcaatgttctga

SEQ ID NO: 349 - RNA, 20 nt, synthetic construct
  misc_feature 1..20: note = Antisense oligonucleotide
  modified_base 19..20: mod_base = OTHER; note = misc_feature - bicyclic nucleic acid scaffold modification
  source 1..20: mol_type = other RNA
agttgcattcaatgttctga

SEQ ID NO: 350 - RNA, 18 nt, synthetic construct
  misc_feature 1..18: note = Antisense oligonucleotide
  source 1..18: mol_type = other RNA
ttgcattcaatgttctga

SEQ ID NO: 351 - RNA, 18 nt, synthetic construct
  modified_base 1: mod_base = OTHER; note = thymine
  misc_feature 1..18: note = Antisense oligonucleotide
  modified_base 1: mod_base = OTHER; note = misc_feature - bicyclic nucleic acid scaffold modification
  source 1..18: mol_type = other RNA
ttgcattcaatgttctga

SEQ ID NO: 352 - RNA, 18 nt, synthetic construct
  misc_feature 1..18: note = Antisense oligonucleotide
  modified_base 18: mod_base = OTHER; note = misc_feature - bicyclic nucleic acid scaffold modification
  source 1..18: mol_type = other RNA
ttgcattcaatgttctga

SEQ ID NO: 353 - RNA, 18 nt, synthetic construct
  modified_base 1: mod_base = OTHER; note = thymine
  misc_feature 1..18: note = Antisense oligonucleotide
  modified_base 1: mod_base = OTHER; note = misc_feature - bicyclic nucleic acid scaffold modification
  modified_base 18: mod_base = OTHER; note = misc_feature - bicyclic nucleic acid scaffold modification
  source 1..18: mol_type = other RNA
ttgcattcaatgttctga

SEQ ID NO: 354 - RNA, 18 nt, synthetic construct
  modified_base 1..2: mod_base = OTHER; note = thymine
  misc_feature 1..18: note = Antisense oligonucleotide
  modified_base 1..2: mod_base = OTHER; note = misc_feature - bicyclic nucleic acid scaffold modification
  source 1..18: mol_type = other RNA
ttgcattcaatgttctga

SEQ ID NO: 355 - RNA, 18 nt, synthetic construct
  misc_feature 1..18: note = Antisense oligonucleotide
  modified_base 17..18: mod_base = OTHER; note = misc_feature - bicyclic nucleic acid scaffold modification
  source 1..18: mol_type = other RNA
ttgcattcaatgttctga

SEQ ID NO: 356 - RNA, 16 nt, synthetic construct
  misc_feature 1..16: note = Antisense oligonucleotide
  source 1..16: mol_type = other RNA
gcattcaatgttctga

SEQ ID NO: 357 - RNA, 16 nt, synthetic construct
  misc_feature 1..16: note = Antisense oligonucleotide
  modified_base 1: mod_base = OTHER; note = misc_feature - bicyclic nucleic acid scaffold modification
  source 1..16: mol_type = other RNA
gcattcaatgttctga

SEQ ID NO: 358 - RNA, 16 nt, synthetic construct
  misc_feature 1..16: note = Antisense oligonucleotide
  modified_base 16: mod_base = OTHER; note = misc_feature - bicyclic nucleic acid scaffold modification
  source 1..16: mol_type = other RNA
gcattcaatgttctga

SEQ ID NO: 359 - RNA, 16 nt, synthetic construct
  misc_feature 1..16: note = Antisense oligonucleotide
  modified_base 1: mod_base = OTHER; note = misc_feature - bicyclic nucleic acid scaffold modification
  modified_base 16: mod_base = OTHER; note = misc_feature - bicyclic nucleic acid scaffold modification
  source 1..16: mol_type = other RNA
gcattcaatgttctga

SEQ ID NO: 360 - RNA, 16 nt, synthetic construct
  misc_feature 1..16: note = Antisense oligonucleotide
  modified_base 1..2: mod_base = OTHER; note = misc_feature - bicyclic nucleic acid scaffold modification
  source 1..16: mol_type = other RNA
gcattcaatgttctga

SEQ ID NO: 361 - RNA, 16 nt, synthetic construct
  misc_feature 1..16: note = Antisense oligonucleotide
  modified_base 15..16: mod_base = OTHER; note = misc_feature - bicyclic nucleic acid scaffold modification
  source 1..16: mol_type = other RNA
gcattcaatgttctga

SEQ ID NO: 362 - RNA, 18 nt, synthetic construct
  misc_feature 1..18: note = Antisense oligonucleotide
  source 1..18: mol_type = other RNA
agttgcattcaatgttct

SEQ ID NO: 363 - RNA, 18 nt, synthetic construct
  misc_feature 1..18: note = Antisense oligonucleotide
  modified_base 1: mod_base = OTHER; note = misc_feature - bicyclic nucleic acid scaffold modification
  source 1..18: mol_type = other RNA
agttgcattcaatgttct

SEQ ID NO: 364 - RNA, 18 nt, synthetic construct
  modified_base 18: mod_base = OTHER; note = thymine
  misc_feature 1..18: note = Antisense oligonucleotide
  modified_base 18: mod_base = OTHER; note = misc_feature - bicyclic nucleic acid scaffold modification
  source 1..18: mol_type = other RNA
agttgcattcaatgttct

SEQ ID NO: 365 - RNA, 18 nt, synthetic construct
  modified_base 18: mod_base = OTHER; note = thymine
  misc_feature 1..18: note = Antisense oligonucleotide
  modified_base 1: mod_base = OTHER; note = misc_feature - bicyclic nucleic acid scaffold modification
  modified_base 18: mod_base = OTHER; note = misc_feature - bicyclic nucleic acid scaffold modification
  source 1..18: mol_type = other RNA
agttgcattcaatgttct

SEQ ID NO: 366 - RNA, 18 nt, synthetic construct
  misc_feature 1..18: note = Antisense oligonucleotide
  modified_base 1..2: mod_base = OTHER; note = misc_feature - bicyclic nucleic acid scaffold modification
  source 1..18: mol_type = other RNA
agttgcattcaatgttct

SEQ ID NO: 367 - RNA, 18 nt, synthetic construct
  modified_base 18: mod_base = OTHER; note = thymine
  misc_feature 1..18: note = Antisense oligonucleotide
  modified_base 17..18: mod_base = OTHER; note = misc_feature - bicyclic nucleic acid scaffold modification
  source 1..18: mol_type = other RNA
agttgcattcaatgttct

SEQ ID NO: 368 - RNA, 22 nt, synthetic construct
  misc_feature 1..22: note = Antisense oligonucleotide
  source 1..22: mol_type = other RNA
tcctgtagaatactggcatctg

SEQ ID NO: 369 - RNA, 22 nt, synthetic construct
  modified_base 1: mod_base = OTHER; note = thymine
  misc_feature 1..22: note = Antisense oligonucleotide
  modified_base 1: mod_base = OTHER; note = misc_feature - bicyclic nucleic acid scaffold modification
  source 1..22: mol_type = other RNA
tcctgtagaatactggcatctg

SEQ ID NO: 370 - RNA, 22 nt, synthetic construct
  misc_feature 1..22: note = Antisense oligonucleotide
  modified_base 22: mod_base = OTHER; note = misc_feature - bicyclic nucleic acid scaffold modification
  source 1..22: mol_type = other RNA
tcctgtagaatactggcatctg

SEQ ID NO: 371 - RNA, 22 nt, synthetic construct
  modified_base 1: mod_base = OTHER; note = thymine
  misc_feature 1..22: note = Antisense oligonucleotide
  modified_base 1: mod_base = OTHER; note = misc_feature - bicyclic nucleic acid scaffold modification
  modified_base 22: mod_base = OTHER; note = misc_feature - bicyclic nucleic acid scaffold modification
  source 1..22: mol_type = other RNA
tcctgtagaatactggcatctg

SEQ ID NO: 372 - RNA, 22 nt, synthetic construct
  modified_base 1: mod_base = OTHER; note = thymine
  misc_feature 1..22: note = Antisense oligonucleotide
  modified_base 1..2: mod_base = OTHER; note = misc_feature - bicyclic nucleic acid scaffold modification
  source 1..22: mol_type = other RNA
tcctgtagaatactggcatctg

SEQ ID NO: 373 - RNA, 22 nt, synthetic construct
  modified_base 21: mod_base = OTHER; note = thymine
  misc_feature 1..22: note = Antisense oligonucleotide
  modified_base 21..22: mod_base = OTHER; note = misc_feature - bicyclic nucleic acid scaffold modification
  source 1..22: mol_type = other RNA
tcctgtagaatactggcatctg

SEQ ID NO: 374 - RNA, 20 nt, synthetic construct
  misc_feature 1..20: note = Antisense oligonucleotide
  source 1..20: mol_type = other RNA
tcctgtagaatactggcatc

SEQ ID NO: 375 - RNA, 20 nt, synthetic construct
  modified_base 1: mod_base = OTHER; note = thymine
  misc_feature 1..20: note = Antisense oligonucleotide
  modified_base 1: mod_base = OTHER; note = misc_feature - bicyclic nucleic acid scaffold modification
  source 1..20: mol_type = other RNA
tcctgtagaatactggcatc

SEQ ID NO: 376 - RNA, 20 nt, synthetic construct
  misc_feature 1..20: note = Antisense oligonucleotide
  modified_base 20: mod_base = OTHER; note = misc_feature - bicyclic nucleic acid scaffold modification
  source 1..20: mol_type = other RNA
tcctgtagaatactggcatc

SEQ ID NO: 377 - RNA, 20 nt, synthetic construct
  modified_base 1: mod_base = OTHER; note = thymine
  misc_feature 1..20: note = Antisense oligonucleotide
  modified_base 1: mod_base = OTHER; note = misc_feature - bicyclic nucleic acid scaffold modification
  modified_base 20: mod_base = OTHER; note = misc_feature - bicyclic nucleic acid scaffold modification
  source 1..20: mol_type = other RNA
tcctgtagaatactggcatc

SEQ ID NO: 378 - RNA, 20 nt, synthetic construct
  modified_base 1: mod_base = OTHER; note = thymine
  misc_feature 1..20: note = Antisense oligonucleotide
  modified_base 1..2: mod_base = OTHER; note = misc_feature - bicyclic nucleic acid scaffold modification
  source 1..20: mol_type = other RNA
tcctgtagaatactggcatc

SEQ ID NO: 379 - RNA, 20 nt, synthetic construct
  modified_base 19: mod_base = OTHER; note = thymine
  misc_feature 1..20: note = Antisense oligonucleotide
  modified_base 19..20: mod_base = OTHER; note = misc_feature - bicyclic nucleic acid scaffold modification
  source 1..20: mol_type = other RNA
tcctgtagaatactggcatc

SEQ ID NO: 380 - RNA, 18 nt, synthetic construct
  misc_feature 1..18: note = Antisense oligonucleotide
  source 1..18: mol_type = other RNA
tcctgtagaatactggca

SEQ ID NO: 381 - RNA, 18 nt, synthetic construct
  modified_base 1: mod_base = OTHER; note = thymine
  misc_feature 1..18: note = Antisense oligonucleotide
  modified_base 1: mod_base = OTHER; note = misc_feature - bicyclic nucleic acid scaffold modification
  source 1..18: mol_type = other RNA
tcctgtagaatactggca

SEQ ID NO: 382 - RNA, 18 nt, synthetic construct
  misc_feature 1..18: note = Antisense oligonucleotide
  modified_base 18: mod_base = OTHER; note = misc_feature - bicyclic nucleic acid scaffold modification
  source 1..18: mol_type = other RNA
tcctgtagaatactggca

SEQ ID NO: 383 - RNA, 18 nt, synthetic construct
  modified_base 1: mod_base = OTHER; note = thymine
  misc_feature 1..18: note = Antisense oligonucleotide
  modified_base 1: mod_base = OTHER; note = misc_feature - bicyclic nucleic acid scaffold modification
  modified_base 18: mod_base = OTHER; note = misc_feature - bicyclic nucleic acid scaffold modification
  source 1..18: mol_type = other RNA
tcctgtagaatactggca

SEQ ID NO: 384 - RNA, 18 nt, synthetic construct
  modified_base 1: mod_base = OTHER; note = thymine
  misc_feature 1..18: note = Antisense oligonucleotide
  modified_base 1..2: mod_base = OTHER; note = misc_feature - bicyclic nucleic acid scaffold modification
  source 1..18: mol_type = other RNA
tcctgtagaatactggca

SEQ ID NO: 385 - RNA, 18 nt, synthetic construct
  misc_feature 1..18: note = Antisense oligonucleotide
  modified_base 17..18: mod_base = OTHER; note = misc_feature - bicyclic nucleic acid scaffold modification
  source 1..18: mol_type = other RNA
tcctgtagaatactggca

SEQ ID NO: 386 - RNA, 16 nt, synthetic construct
  misc_feature 1..16: note = Antisense oligonucleotide
  source 1..16: mol_type = other RNA
tcctgtagaatactgg

SEQ ID NO: 387 - RNA, 16 nt, synthetic construct
  modified_base 1: mod_base = OTHER; note = thymine
  misc_feature 1..16: note = Antisense oligonucleotide
  modified_base 1: mod_base = OTHER; note = misc_feature - bicyclic nucleic acid scaffold modification
  source 1..16: mol_type = other RNA
tcctgtagaatactgg

SEQ ID NO: 388 - RNA, 16 nt, synthetic construct
  misc_feature 1..16: note = Antisense oligonucleotide
  modified_base 16: mod_base = OTHER; note = misc_feature - bicyclic nucleic acid scaffold modification
  source 1..16: mol_type = other RNA
tcctgtagaatactgg

SEQ ID NO: 389 - RNA, 16 nt, synthetic construct
  modified_base 1: mod_base = OTHER; note = thymine
  misc_feature 1..16: note = Antisense oligonucleotide
  modified_base 1: mod_base = OTHER; note = misc_feature - bicyclic nucleic acid scaffold modification
  modified_base 16: mod_base = OTHER; note = misc_feature - bicyclic nucleic acid scaffold modification
  source 1..16: mol_type = other RNA
tcctgtagaatactgg

SEQ ID NO: 390 - RNA, 16 nt, synthetic construct
  modified_base 1: mod_base = OTHER; note = thymine
  misc_feature 1..16: note = Antisense oligonucleotide
  modified_base 1..2: mod_base = OTHER; note = misc_feature - bicyclic nucleic acid scaffold modification
  source 1..16: mol_type = other RNA
tcctgtagaatactgg

SEQ ID NO: 391 - RNA, 16 nt, synthetic construct
  misc_feature 1..16: note = Antisense oligonucleotide
  modified_base 15..16: mod_base = OTHER; note = misc_feature - bicyclic nucleic acid scaffold modification
  source 1..16: mol_type = other RNA
tcctgtagaatactgg

SEQ ID NO: 392 - RNA, 20 nt, synthetic construct
  misc_feature 1..20: note = Antisense oligonucleotide
  source 1..20: mol_type = other RNA
ctgtagaatactggcatctg

SEQ ID NO: 393 - RNA, 20 nt, synthetic construct
  misc_feature 1..20: note = Antisense oligonucleotide
  modified_base 1: mod_base = OTHER; note = misc_feature - bicyclic nucleic acid scaffold modification
  source 1..20: mol_type = other RNA
ctgtagaatactggcatctg

SEQ ID NO: 394 - RNA, 20 nt, synthetic construct
  misc_feature 1..20: note = Antisense oligonucleotide
  modified_base 20: mod_base = OTHER; note = misc_feature - bicyclic nucleic acid scaffold modification
  source 1..20: mol_type = other RNA
ctgtagaatactggcatctg

SEQ ID NO: 395 - RNA, 20 nt, synthetic construct
  misc_feature 1..20: note = Antisense oligonucleotide
  modified_base 1: mod_base = OTHER; note = misc_feature - bicyclic nucleic acid scaffold modification
  modified_base 20: mod_base = OTHER; note = misc_feature - bicyclic nucleic acid scaffold modification
  source 1..20: mol_type = other RNA
ctgtagaatactggcatctg

SEQ ID NO: 396 - RNA, 20 nt, synthetic construct
  modified_base 2: mod_base = OTHER; note = thymine
  misc_feature 1..20: note = Antisense oligonucleotide
  modified_base 1..2: mod_base = OTHER; note = misc_feature - bicyclic nucleic acid scaffold modification
  source 1..20: mol_type = other RNA
ctgtagaatactggcatctg

SEQ ID NO: 397 - RNA, 20 nt, synthetic construct
  modified_base 19: mod_base = OTHER; note = thymine
  misc_feature 1..20: note = Antisense oligonucleotide
  modified_base 19..20: mod_base = OTHER; note = misc_feature - bicyclic nucleic acid scaffold modification
  source 1..20: mol_type = other RNA
ctgtagaatactggcatctg

SEQ ID NO: 398 - RNA, 18 nt, synthetic construct
  misc_feature 1..18: note = Antisense oligonucleotide
  source 1..18: mol_type = other RNA
gtagaatactggcatctg

SEQ ID NO: 399 - RNA, 18 nt, synthetic construct
  misc_feature 1..18: note = Antisense oligonucleotide
  modified_base 1: mod_base = OTHER; note = misc_feature - bicyclic nucleic acid scaffold modification
  source 1..18: mol_type = other RNA
gtagaatactggcatctg

SEQ ID NO: 400 - RNA, 18 nt, synthetic construct
  misc_feature 1..18: note = Antisense oligonucleotide
  modified_base 18: mod_base = OTHER; note = misc_feature - bicyclic nucleic acid scaffold modification
  source 1..18: mol_type = other RNA
gtagaatactggcatctg

SEQ ID NO: 401 - RNA, 18 nt, synthetic construct
  misc_feature 1..18: note = Antisense oligonucleotide
  modified_base 1: mod_base = OTHER; note = misc_feature - bicyclic nucleic acid scaffold modification
  modified_base 18: mod_base = OTHER; note = misc_feature - bicyclic nucleic acid scaffold modification
  source 1..18: mol_type = other RNA
gtagaatactggcatctg

SEQ ID NO: 402 - RNA, 18 nt, synthetic construct
  modified_base 2: mod_base = OTHER; note = thymine
  misc_feature 1..18: note = Antisense oligonucleotide
  modified_base 1..2: mod_base = OTHER; note = misc_feature - bicyclic nucleic acid scaffold modification
  source 1..18: mol_type = other RNA
gtagaatactggcatctg

SEQ ID NO: 403 - RNA, 18 nt, synthetic construct
  modified_base 17: mod_base = OTHER; note = thymine
  misc_feature 1..18: note = Antisense oligonucleotide
  modified_base 17..18: mod_base = OTHER; note = misc_feature - bicyclic nucleic acid scaffold modification
  source 1..18: mol_type = other RNA
gtagaatactggcatctg

SEQ ID NO: 404 - RNA, 16 nt, synthetic construct
  misc_feature 1..16: note = Antisense oligonucleotide
  source 1..16: mol_type = other RNA
agaatactggcatctg

SEQ ID NO: 405 - RNA, 16 nt, synthetic construct
  misc_feature 1..16: note = Antisense oligonucleotide
  modified_base 1: mod_base = OTHER; note = misc_feature - bicyclic nucleic acid scaffold modification
  source 1..16: mol_type = other RNA
agaatactggcatctg

SEQ ID NO: 406 - RNA, 16 nt, synthetic construct
  misc_feature 1..16: note = Antisense oligonucleotide
  modified_base 16: mod_base = OTHER; note = misc_feature - bicyclic nucleic acid scaffold modification
  source 1..16: mol_type = other RNA
agaatactggcatctg

SEQ ID NO: 407 - RNA, 16 nt, synthetic construct
  misc_feature 1..16: note = Antisense oligonucleotide
  modified_base 1: mod_base = OTHER; note = misc_feature - bicyclic nucleic acid scaffold modification
  modified_base 16: mod_base = OTHER; note = misc_feature - bicyclic nucleic acid scaffold modification
  source 1..16: mol_type = other RNA
agaatactggcatctg

SEQ ID NO: 408 - RNA, 16 nt, synthetic construct
  misc_feature 1..16: note = Antisense oligonucleotide
  modified_base 1..2: mod_base = OTHER; note = misc_feature - bicyclic nucleic acid scaffold modification
  source 1..16: mol_type = other RNA
agaatactggcatctg

SEQ ID NO: 409 - RNA, 16 nt, synthetic construct
  modified_base 15: mod_base = OTHER; note = thymine
  misc_feature 1..16: note = Antisense oligonucleotide
  modified_base 15..16: mod_base = OTHER; note = misc_feature - bicyclic nucleic acid scaffold modification
  source 1..16: mol_type = other RNA
agaatactggcatctg

SEQ ID NO: 410 - RNA, 18 nt, synthetic construct
  misc_feature 1..18: note = Antisense oligonucleotide
  source 1..18: mol_type = other RNA
ctgtagaatactggcatc

SEQ ID NO: 411 - RNA, 18 nt, synthetic construct
  misc_feature 1..18: note = Antisense oligonucleotide
  modified_base 1: mod_base = OTHER; note = misc_feature - bicyclic nucleic acid scaffold modification
  source 1..18: mol_type = other RNA
ctgtagaatactggcatc

SEQ ID NO: 412 - RNA, 18 nt, synthetic construct
  misc_feature 1..18: note = Antisense oligonucleotide
  modified_base 18: mod_base = OTHER; note = misc_feature - bicyclic nucleic acid scaffold modification
  source 1..18: mol_type = other RNA
ctgtagaatactggcatc

SEQ ID NO: 413 - RNA, 18 nt, synthetic construct
  misc_feature 1..18: note = Antisense oligonucleotide
  modified_base 1: mod_base = OTHER; note = misc_feature - bicyclic nucleic acid scaffold modification
  modified_base 18: mod_base = OTHER; note = misc_feature - bicyclic nucleic acid scaffold modification
  source 1..18: mol_type = other RNA
ctgtagaatactggcatc

SEQ ID NO: 414 - RNA, 18 nt, synthetic construct
  modified_base 2: mod_base = OTHER; note = thymine
  misc_feature 1..18: note = Antisense oligonucleotide
  modified_base 1..2: mod_base = OTHER; note = misc_feature - bicyclic nucleic acid scaffold modification
  source 1..18: mol_type = other RNA
ctgtagaatactggcatc

SEQ ID NO: 415 - RNA, 18 nt, synthetic construct
  modified_base 17: mod_base = OTHER; note = thymine
  misc_feature 1..18: note = Antisense oligonucleotide
  modified_base 17..18: mod_base = OTHER; note = misc_feature - bicyclic nucleic acid scaffold modification
  source 1..18: mol_type = other RNA
ctgtagaatactggcatc

SEQ ID NO: 416 - RNA, 21 nt, synthetic construct
  misc_feature 1..21: note = Antisense oligonucleotide
  source 1..21: mol_type = other RNA
gtttgcagacctcctgccacc

SEQ ID NO: 417 - RNA, 21 nt, synthetic construct
  misc_feature 1..21: note = Antisense oligonucleotide
  modified_base 1: mod_base = OTHER; note = misc_feature - bicyclic nucleic acid scaffold modification
  source 1..21: mol_type = other RNA
gtttgcagacctcctgccacc

SEQ ID NO: 418 - RNA, 21 nt, synthetic construct
  misc_feature 1..21: note = Antisense oligonucleotide
  modified_base 21: mod_base = OTHER; note = misc_feature - bicyclic nucleic acid scaffold modification
  source 1..21: mol_type = other RNA
gtttgcagacctcctgccacc

SEQ ID NO: 419 - RNA, 21 nt, synthetic construct
  misc_feature 1..21: note = Antisense oligonucleotide
  modified_base 1: mod_base = OTHER; note = misc_feature - bicyclic nucleic acid scaffold modification
  modified_base 21: mod_base = OTHER; note = misc_feature - bicyclic nucleic acid scaffold modification
  source 1..21: mol_type = other RNA
gtttgcagacctcctgccacc

SEQ ID NO: 420 - RNA, 21 nt, synthetic construct
  modified_base 2: mod_base = OTHER; note = thymine
  misc_feature 1..21: note = Antisense oligonucleotide
  modified_base 1..2: mod_base = OTHER; note = misc_feature - bicyclic nucleic acid scaffold modification
  source 1..21: mol_type = other RNA
gtttgcagacctcctgccacc

SEQ ID NO: 421 - RNA, 21 nt, synthetic construct
  misc_feature 1..21: note = Antisense oligonucleotide
  modified_base 20..21: mod_base = OTHER; note = misc_feature - bicyclic nucleic acid scaffold modification
  source 1..21: mol_type = other RNA
gtttgcagacctcctgccacc

SEQ ID NO: 422 - RNA, 18 nt, synthetic construct
  misc_feature 1..18: note = Antisense oligonucleotide
  source 1..18: mol_type = other RNA
gtttgcagacctcctgcc

SEQ ID NO: 423 - RNA, 18 nt, synthetic construct
  misc_feature 1..18: note = Antisense oligonucleotide
  modified_base 1: mod_base = OTHER; note = misc_feature - bicyclic nucleic acid scaffold modification
  source 1..18: mol_type = other RNA
gtttgcagacctcctgcc

SEQ ID NO: 424 - RNA, 18 nt, synthetic construct
  misc_feature 1..18: note = Antisense oligonucleotide
  modified_base 18: mod_base = OTHER; note = misc_feature - bicyclic nucleic acid scaffold modification
  source 1..18: mol_type = other RNA
gtttgcagacctcctgcc

SEQ ID NO: 425 - RNA, 18 nt, synthetic construct
  misc_feature 1..18: note = Antisense oligonucleotide
  modified_base 1: mod_base = OTHER; note = misc_feature - bicyclic nucleic acid scaffold modification
  modified_base 18: mod_base = OTHER; note = misc_feature - bicyclic nucleic acid scaffold modification
  source 1..18: mol_type = other RNA
gtttgcagacctcctgcc

SEQ ID NO: 426 - RNA, 18 nt, synthetic construct
  modified_base 2: mod_base = OTHER; note = thymine
  misc_feature 1..18: note = Antisense oligonucleotide
  modified_base 1..2: mod_base = OTHER; note = misc_feature - bicyclic nucleic acid scaffold modification
  source 1..18: mol_type = other RNA
gtttgcagacctcctgcc

SEQ ID NO: 427 - RNA, 18 nt, synthetic construct
  misc_feature 1..18: note = Antisense oligonucleotide
  modified_base 17..18: mod_base = OTHER; note = misc_feature - bicyclic nucleic acid scaffold modification
  source 1..18: mol_type = other RNA
gtttgcagacctcctgcc

SEQ ID NO: 428 - RNA, 16 nt, synthetic construct
  misc_feature 1..16: note = Antisense oligonucleotide
  source 1..16: mol_type = other RNA
gtttgcagacctcctg

SEQ ID NO: 429 - RNA, 16 nt, synthetic construct
  misc_feature 1..16: note = Antisense oligonucleotide
  modified_base 1: mod_base = OTHER; note = misc_feature - bicyclic nucleic acid scaffold modification
  source 1..16: mol_type = other RNA
gtttgcagacctcctg

SEQ ID NO: 430 - RNA, 16 nt, synthetic construct
  misc_feature 1..16: note = Antisense oligonucleotide
  modified_base 16: mod_base = OTHER; note = misc_feature - bicyclic nucleic acid scaffold modification
  source 1..16: mol_type = other RNA
gtttgcagacctcctg

SEQ ID NO: 431 - RNA, 16 nt, synthetic construct
  misc_feature 1..16: note = Antisense oligonucleotide
  modified_base 1: mod_base = OTHER; note = misc_feature - bicyclic nucleic acid scaffold modification
  modified_base 16: mod_base = OTHER; note = misc_feature - bicyclic nucleic acid scaffold modification
  source 1..16: mol_type = other RNA
gtttgcagacctcctg

SEQ ID NO: 432 - RNA, 16 nt, synthetic construct
  modified_base 2: mod_base = OTHER; note = thymine
  misc_feature 1..16: note = Antisense oligonucleotide
  modified_base 1..2: mod_base = OTHER; note = misc_feature - bicyclic nucleic acid scaffold modification
  source 1..16: mol_type = other RNA
gtttgcagacctcctg

SEQ ID NO: 433 - RNA, 16 nt, synthetic construct
  modified_base 15: mod_base = OTHER; note = thymine
  misc_feature 1..16: note = Antisense oligonucleotide
  modified_base 15..16: mod_base = OTHER; note = misc_feature - bicyclic nucleic acid scaffold modification
  source 1..16: mol_type = other RNA
gtttgcagacctcctg

SEQ ID NO: 434 - RNA, 18 nt, synthetic construct
  misc_feature 1..18: note = Antisense oligonucleotide
  source 1..18: mol_type = other RNA
tgcagacctcctgccacc

SEQ ID NO: 435 - RNA, 18 nt, synthetic construct
  modified_base 1: mod_base = OTHER; note = thymine
  misc_feature 1..18: note = Antisense oligonucleotide
  modified_base 1: mod_base = OTHER; note = misc_feature - bicyclic nucleic acid scaffold modification
  source 1..18: mol_type = other RNA
tgcagacctcctgccacc

SEQ ID NO: 436 - RNA, 18 nt, synthetic construct
  misc_feature 1..18: note = Antisense oligonucleotide
  modified_base 18: mod_base = OTHER; note = misc_feature - bicyclic nucleic acid scaffold modification
  source 1..18: mol_type = other RNA
tgcagacctcctgccacc

SEQ ID NO: 437 - RNA, 18 nt, synthetic construct
  modified_base 1: mod_base = OTHER; note = thymine
  misc_feature 1..18: note = Antisense oligonucleotide
  modified_base 1: mod_base = OTHER; note = misc_feature - bicyclic nucleic acid scaffold modification
  modified_base 18: mod_base = OTHER; note = misc_feature - bicyclic nucleic acid scaffold modification
  source 1..18: mol_type = other RNA
tgcagacctcctgccacc

SEQ ID NO: 438 - RNA, 18 nt, synthetic construct
  modified_base 1: mod_base = OTHER; note = thymine
  misc_feature 1..18: note = Antisense oligonucleotide
  modified_base 1..2: mod_base = OTHER; note = misc_feature - bicyclic nucleic acid scaffold modification
  source 1..18: mol_type = other RNA
tgcagacctcctgccacc

SEQ ID NO: 439 - RNA, 18 nt, synthetic construct
  misc_feature 1..18: note = Antisense oligonucleotide
  modified_base 17..18: mod_base = OTHER; note = misc_feature - bicyclic nucleic acid scaffold modification
  source 1..18: mol_type = other RNA
tgcagacctcctgccacc

SEQ ID NO: 440 - RNA, 16 nt, synthetic construct
  misc_feature 1..16: note = Antisense oligonucleotide
  source 1..16: mol_type = other RNA
cagacctcctgccacc

SEQ ID NO: 441 - RNA, 16 nt, synthetic construct
  misc_feature 1..16: note = Antisense oligonucleotide
  modified_base 1: mod_base = OTHER; note = misc_feature - bicyclic nucleic acid scaffold modification
  source 1..16: mol_type = other RNA
cagacctcctgccacc

SEQ ID NO: 442 - RNA, 16 nt, synthetic construct
  misc_feature 1..16: note = Antisense oligonucleotide
  modified_base 16: mod_base = OTHER; note = misc_feature - bicyclic nucleic acid scaffold modification
  source 1..16: mol_type = other RNA
cagacctcctgccacc

SEQ ID NO: 443 - RNA, 16 nt, synthetic construct
  misc_feature 1..16: note = Antisense oligonucleotide
  modified_base 1: mod_base = OTHER; note = misc_feature - bicyclic nucleic acid scaffold modification
  modified_base 16: mod_base = OTHER; note = misc_feature - bicyclic nucleic acid scaffold modification
  source 1..16: mol_type = other RNA
cagacctcctgccacc

SEQ ID NO: 444 - RNA, 16 nt, synthetic construct
  misc_feature 1..16: note = Antisense oligonucleotide
  modified_base 1..2: mod_base = OTHER; note = misc_feature - bicyclic nucleic acid scaffold modification
  source 1..16: mol_type = other RNA
cagacctcctgccacc

SEQ ID NO: 445 - RNA, 16 nt, synthetic construct
  misc_feature 1..16: note = Antisense oligonucleotide
  modified_base 15..16: mod_base = OTHER; note = misc_feature - bicyclic nucleic acid scaffold modification
  source 1..16: mol_type = other RNA
cagacctcctgccacc

SEQ ID NO: 446 - RNA, 18 nt, synthetic construct
  misc_feature 1..18: note = Antisense oligonucleotide
  source 1..18: mol_type = other RNA
ttgcagacctcctgccac

SEQ ID NO: 447 - RNA, 18 nt, synthetic construct
  modified_base 1: mod_base = OTHER; note = thymine
  misc_feature 1..18: note = Antisense oligonucleotide
  modified_base 1: mod_base = OTHER; note = misc_feature - bicyclic nucleic acid scaffold modification
  source 1..18: mol_type = other RNA
ttgcagacctcctgccac

SEQ ID NO: 448 - RNA, 18 nt, synthetic construct
  misc_feature 1..18: note = Antisense oligonucleotide
  modified_base 18: mod_base = OTHER; note = misc_feature - bicyclic nucleic acid scaffold modification
  source 1..18: mol_type = other RNA
ttgcagacctcctgccac

SEQ ID NO: 449 - RNA, 18 nt, synthetic construct
  modified_base 1: mod_base = OTHER; note = thymine
  misc_feature 1..18: note = Antisense oligonucleotide
  modified_base 1: mod_base = OTHER; note = misc_feature - bicyclic nucleic acid scaffold modification
  modified_base 18: mod_base = OTHER; note = misc_feature - bicyclic nucleic acid scaffold modification
  source 1..18: mol_type = other RNA
ttgcagacctcctgccac

SEQ ID NO: 450 - RNA, 18 nt, synthetic construct
  modified_base 1..2: mod_base = OTHER; note = thymine
  misc_feature 1..18: note = Antisense oligonucleotide
  modified_base 1..2: mod_base = OTHER; note = misc_feature - bicyclic nucleic acid scaffold modification
  source 1..18: mol_type = other RNA
ttgcagacctcctgccac

SEQ ID NO: 451 - RNA, 18 nt, synthetic construct
  misc_feature 1..18: note = Antisense oligonucleotide
  modified_base 17..18: mod_base = OTHER; note = misc_feature - bicyclic nucleic acid scaffold modification
  source 1..18: mol_type = other RNA
ttgcagacctcctgccac

SEQ ID NO: 452 - RNA, 20 nt, synthetic construct
  misc_feature 1..20: note = Antisense oligonucleotide
  source 1..20: mol_type = other RNA
  modified_base 1: mod_base = OTHER; note = 2'-O-methyl uridine phosphorothioate
  modified_base 2: mod_base = OTHER; note = 2'-O-methyl cytidine phosphorothioate
  modified_base 3: mod_base = OTHER; note = 2'-O-methyl adenosine phosphorothioate
  modified_base 4: mod_base = OTHER; note = 2'-O-methyl adenosine phosphorothioate
  modified_base 5: mod_base = OTHER; note = 2'-O-methyl guanosine phosphorothioate
  modified_base 6: mod_base = OTHER; note = 2'-O-methyl guanosine phosphorothioate
  modified_base 7: mod_base = OTHER; note = 2'-O-methyl adenosine phosphorothioate
  modified_base 8: mod_base = OTHER; note = 2'-O-methyl adenosine phosphorothioate
  modified_base 9: mod_base = OTHER; note = 2'-O-methyl guanosine phosphorothioate
  modified_base 10: mod_base = OTHER; note = 2'-O-methyl adenosine phosphorothioate
  modified_base 11: mod_base = OTHER; note = 2'-O-methyl uridine phosphorothioate
  modified_base 12: mod_base = OTHER; note = 2'-O-methyl guanosine phosphorothioate
  modified_base 13: mod_base = OTHER; note = 2'-O-methyl guanosine phosphorothioate
  modified_base 14: mod_base = OTHER; note = 2'-O-methyl cytidine phosphorothioate
  modified_base 15: mod_base = OTHER; note = 2'-O-methyl adenosine phosphorothioate
  modified_base 16: mod_base = OTHER; note = 2'-O-methyl uridine phosphorothioate
  modified_base 17: mod_base = OTHER; note = 2'-O-methyl uridine phosphorothioate
  modified_base 18: mod_base = OTHER; note = 2'-O-methyl uridine phosphorothioate
  modified_base 19: mod_base = OTHER; note = 2'-O-methyl cytidine phosphorothioate
  modified_base 20: mod_base = OTHER; note = 2'-O-methyl uridine
tcaaggaagatggcatttct

SEQ ID NO: 453 - RNA, 20 nt, synthetic construct
  misc_feature 1..20: note = Antisense oligonucleotide
  source 1..20: mol_type = other RNA
  modified_base 1: mod_base = OTHER; note = misc_feature - thymine bicyclic nucleic acid scaffold modification phosphorothioate
  modified_base 2: mod_base = OTHER; note = 5-methylcytosine phosphorothioate
  modified_base 3: mod_base = OTHER; note = 2'-O-methyl adenosine phosphorothioate
  modified_base 4: mod_base = OTHER; note = 2'-O-methyl adenosine phosphorothioate
  modified_base 5: mod_base = OTHER; note = 2'-O-methyl guanosine phosphorothioate
  modified_base 6: mod_base = OTHER; note = 2'-O-methyl guanosine phosphorothioate
  modified_base 7: mod_base = OTHER; note = 2'-O-methyl adenosine phosphorothioate
  modified_base 8: mod_base = OTHER; note = 2'-O-methyl adenosine phosphorothioate
  modified_base 9: mod_base = OTHER; note = 2'-O-methyl guanosine phosphorothioate
  modified_base 10: mod_base = OTHER; note = 2'-O-methyl adenosine phosphorothioate
  modified_base 11: mod_base = OTHER; note = 2'-O-methyl uridine phosphorothioate
  modified_base 12: mod_base = OTHER; note = 2'-O-methyl guanosine phosphorothioate
  modified_base 13: mod_base = OTHER; note = 2'-O-methyl guanosine phosphorothioate
  modified_base 14: mod_base = OTHER; note = 5-methylcytosine phosphorothioate
  modified_base 15: mod_base = OTHER; note = 2'-O-methyl adenosine phosphorothioate
  modified_base 16: mod_base = OTHER; note = 2'-O-methyl uridine phosphorothioate
  modified_base 17: mod_base = OTHER; note = 2'-O-methyl uridine phosphorothioate
  modified_base 18: mod_base = OTHER; note = 2'-O-methyl uridine phosphorothioate
  modified_base 19: mod_base = OTHER; note = 5-methylcytosine phosphorothioate
  modified_base 20: mod_base = OTHER; note = 2'-O-methyl uridine
tcaaggaagatggcatttct

SEQ ID NO: 454 - RNA, 20 nt, synthetic construct
  modified_base 20: mod_base = OTHER; note = thymine
  misc_feature 1..20: note = Antisense oligonucleotide
  modified_base 20: mod_base = OTHER; note = misc_feature - bicyclic nucleic acid scaffold modification
  source 1..20: mol_type = other RNA
tcaaggaagatggcatttct

SEQ ID NO: 455 - RNA, 20 nt, synthetic construct
  misc_feature 1..20: note = Antisense oligonucleotide
  source 1..20: mol_type = other RNA
  modified_base 1: mod_base = OTHER; note = misc_feature - locked thymine bicyclic nucleic acid scaffold modification phosphorothioate
  modified_base 2: mod_base = OTHER; note = 5-methylcytosine phosphorothioate
  modified_base 3: mod_base = OTHER; note = 2'-O-methyl adenosine phosphorothioate
  modified_base 4: mod_base = OTHER; note = 2'-O-methyl adenosine phosphorothioate
  modified_base 5: mod_base = OTHER; note = 2'-O-methyl guanosine phosphorothioate
  modified_base 6: mod_base = OTHER; note = 2'-O-methyl guanosine phosphorothioate
  modified_base 7: mod_base = OTHER; note = 2'-O-methyl adenosine phosphorothioate
  modified_base 8: mod_base = OTHER; note = 2'-O-methyl adenosine phosphorothioate
  modified_base 9: mod_base = OTHER; note = 2'-O-methyl guanosine phosphorothioate
  modified_base 10: mod_base = OTHER; note = 2'-O-methyl adenosine phosphorothioate
  modified_base 11: mod_base = OTHER; note = 2'-O-methyl uridine phosphorothioate
  modified_base 12: mod_base = OTHER; note = 2'-O-methyl guanosine phosphorothioate
  modified_base 13: mod_base = OTHER; note = 2'-O-methyl guanosine phosphorothioate
  modified_base 14: mod_base = OTHER; note = 5-methylcytosine phosphorothioate
  modified_base 15: mod_base = OTHER; note = 2'-O-methyl adenosine phosphorothioate
  modified_base 16: mod_base = OTHER; note = 2'-O-methyl uridine phosphorothioate
  modified_base 17: mod_base = OTHER; note = 2'-O-methyl uridine phosphorothioate
  modified_base 18: mod_base = OTHER; note = 2'-O-methyl uridine phosphorothioate
  modified_base 19: mod_base = OTHER; note = 5-methylcytosine phosphorothioate
  modified_base 20: mod_base = OTHER; note = misc_feature - locked thymine bicyclic nucleic acid scaffold modification
tcaaggaagatggcatttct

SEQ ID NO: 456 - RNA, 20 nt, synthetic construct
  misc_feature 1..20: note = Antisense oligonucleotide
  source 1..20: mol_type = other RNA
  modified_base 1: mod_base = OTHER; note = misc_feature - thymine bicyclic nucleic acid scaffold modification phosphorothioate
  modified_base 2: mod_base = OTHER; note = misc_feature - 5-methylcytosine bicyclic nucleic acid scaffold modification phosphorothioate
  modified_base 3: mod_base = OTHER; note = 2'-O-methyl adenosine phosphorothioate
  modified_base 4: mod_base = OTHER; note = 2'-O-methyl adenosine phosphorothioate
  modified_base 5: mod_base = OTHER; note = 2'-O-methyl guanosine phosphorothioate
  modified_base 6: mod_base = OTHER; note = 2'-O-methyl guanosine phosphorothioate
  modified_base 7: mod_base = OTHER; note = 2'-O-methyl adenosine phosphorothioate
  modified_base 8: mod_base = OTHER; note = 2'-O-methyl adenosine phosphorothioate
  modified_base 9: mod_base = OTHER; note = 2'-O-methyl guanosine phosphorothioate
  modified_base 10: mod_base = OTHER; note = 2'-O-methyl adenosine phosphorothioate
  modified_base 11: mod_base = OTHER; note = 2'-O-methyl uridine phosphorothioate
  modified_base 12: mod_base = OTHER; note = 2'-O-methyl guanosine phosphorothioate
  modified_base 13: mod_base = OTHER; note = 2'-O-methyl guanosine phosphorothioate
  modified_base 14: mod_base = OTHER; note = 5-methylcytosine phosphorothioate
  modified_base 15: mod_base = OTHER; note = 2'-O-methyl adenosine phosphorothioate
  modified_base 16: mod_base = OTHER; note = 2'-O-methyl uridine phosphorothioate
  modified_base 17: mod_base = OTHER; note = 2'-O-methyl uridine phosphorothioate
  modified_base 18: mod_base = OTHER; note = 2'-O-methyl uridine phosphorothioate
  modified_base 19: mod_base = OTHER; note = 5-methylcytosine phosphorothioate
  modified_base 20: mod_base = OTHER; note = 2'-O-methyl uridine
tcaaggaagatggcatttct

SEQ ID NO: 457 - RNA, 20 nt, synthetic construct
  modified_base 20: mod_base = OTHER; note = thymine
  misc_feature 1..20: note = Antisense oligonucleotide
  modified_base 19..20: mod_base = OTHER; note = misc_feature - bicyclic nucleic acid scaffold modification
  source 1..20: mol_type = other RNA
tcaaggaagatggcatttct

SEQ ID NO: 458 - RNA, 22 nt, synthetic construct
  misc_feature 1..22: note = Antisense oligonucleotide
  source 1..22: mol_type = other RNA
tcaaggaagatggcatttctag

SEQ ID NO: 459 - RNA, 22 nt, synthetic construct
  misc_feature 1..22: note = Antisense oligonucleotide
  source 1..22: mol_type = other RNA
  modified_base 1: mod_base = OTHER; note = misc_feature - locked thymine bicyclic nucleic acid scaffold modification phosphorothioate
  modified_base 2: mod_base = OTHER; note = 5-methylcytosine phosphorothioate
  modified_base 3: mod_base = OTHER; note = 2'-O-methyl adenosine phosphorothioate
  modified_base 4: mod_base = OTHER; note = 2'-O-methyl adenosine phosphorothioate
  modified_base 5: mod_base = OTHER; note = 2'-O-methyl guanosine phosphorothioate
  modified_base 6: mod_base = OTHER; note = 2'-O-methyl guanosine phosphorothioate
  modified_base 7: mod_base = OTHER; note = 2'-O-methyl adenosine phosphorothioate
  modified_base 8: mod_base = OTHER; note = 2'-O-methyl adenosine phosphorothioate
  modified_base 9: mod_base = OTHER; note = 2'-O-methyl guanosine phosphorothioate
  modified_base 10: mod_base = OTHER; note = 2'-O-methyl adenosine phosphorothioate
  modified_base 11: mod_base = OTHER; note = 2'-O-methyl uridine phosphorothioate
  modified_base 12: mod_base = OTHER; note = 2'-O-methyl guanosine phosphorothioate
  modified_base 13: mod_base = OTHER; note = 2'-O-methyl guanosine phosphorothioate
  modified_base 14: mod_base = OTHER; note = 5-methylcytosine phosphorothioate
  modified_base 15: mod_base = OTHER; note = 2'-O-methyl adenosine phosphorothioate
  modified_base 16: mod_base = OTHER; note = 2'-O-methyl uridine phosphorothioate
  modified_base 17: mod_base = OTHER; note = 2'-O-methyl uridine phosphorothioate
  modified_base 18: mod_base = OTHER; note = 2'-O-methyl uridine phosphorothioate
  modified_base 19: mod_base = OTHER; note = 5-methylcytosine phosphorothioate
  modified_base 20: mod_base = OTHER; note = 2'-O-methyl uridine phosphorothioate
  modified_base 21: mod_base = OTHER; note = 2'-O-methyl adenosine phosphorothioate
  modified_base 22: mod_base = OTHER; note = 2'-O-methyl guanosine
tcaaggaagatggcatttctag

SEQ ID NO: 460 - RNA, 22 nt, synthetic construct
  misc_feature 1..22: note = Antisense oligonucleotide
  modified_base 22: mod_base = OTHER; note = misc_feature - bicyclic nucleic acid scaffold modification
  source 1..22: mol_type = other RNA
tcaaggaagatggcatttctag

SEQ ID NO: 461 - RNA, 22 nt, synthetic construct
  modified_base 1: mod_base = OTHER; note = thymine
  misc_feature 1..22: note = Antisense oligonucleotide
  modified_base 1: mod_base = OTHER; note = misc_feature - bicyclic nucleic acid scaffold modification
  modified_base 22: mod_base = OTHER; note = misc_feature - bicyclic nucleic acid scaffold modification
  source 1..22: mol_type = other RNA
tcaaggaagatggcatttctag

SEQ ID NO: 462 - RNA, 22 nt, synthetic construct
  modified_base 1: mod_base = OTHER; note = thymine
  misc_feature 1..22: note = Antisense oligonucleotide
  modified_base 1..2: mod_base = OTHER; note = misc_feature - bicyclic nucleic acid scaffold modification
  source 1..22: mol_type = other RNA
tcaaggaagatggcatttctag

SEQ ID NO: 463 - RNA, 22 nt, synthetic construct
  misc_feature 1..22: note = Antisense oligonucleotide
  modified_base 21..22: mod_base = OTHER; note = misc_feature - bicyclic nucleic acid scaffold modification
  source 1..22: mol_type = other RNA
tcaaggaagatggcatttctag

SEQ ID NO: 464 - RNA, 18 nt, synthetic construct
  misc_feature 1..18: note = Antisense oligonucleotide
  source 1..18: mol_type = other RNA
aaggaagatggcatttct

SEQ ID NO: 465 - RNA, 18 nt, synthetic construct
  misc_feature 1..18: note = Antisense oligonucleotide
  modified_base 1: mod_base = OTHER; note = misc_feature - bicyclic nucleic acid scaffold modification
  source 1..18: mol_type = other RNA
aaggaagatggcatttct

SEQ ID NO: 466 - RNA, 18 nt, synthetic construct
  modified_base 18: mod_base = OTHER; note = thymine
  misc_feature 1..18: note = Antisense oligonucleotide
  modified_base 18: mod_base = OTHER; note = misc_feature - bicyclic nucleic acid scaffold modification
  source 1..18: mol_type = other RNA
aaggaagatggcatttct

SEQ ID NO: 467 - RNA, 18 nt, synthetic construct
  modified_base 18: mod_base = OTHER; note = thymine
  misc_feature 1..18: note = Antisense oligonucleotide
  modified_base 1: mod_base = OTHER; note = misc_feature - bicyclic nucleic acid scaffold modification
  modified_base 18: mod_base = OTHER; note = misc_feature - bicyclic nucleic acid scaffold modification
  source 1..18: mol_type = other RNA
aaggaagatggcatttct

SEQ ID NO: 468 - RNA, 18 nt, synthetic construct
  misc_feature 1..18: note = Antisense oligonucleotide
  modified_base 1..2: mod_base = OTHER; note = misc_feature - bicyclic nucleic acid scaffold modification
  source 1..18: mol_type = other RNA
aaggaagatggcatttct

SEQ ID NO: 469 - RNA, 18 nt, synthetic construct
  modified_base 18: mod_base = OTHER; note = thymine
  misc_feature 1..18: note = Antisense oligonucleotide
  modified_base 17..18: mod_base = OTHER; note = misc_feature - bicyclic nucleic acid scaffold modification
  source 1..18: mol_type = other RNA
aaggaagatggcatttct

SEQ ID NO: 470 - RNA, 16 nt, synthetic construct
  misc_feature 1..16: note = Antisense oligonucleotide
  source 1..16: mol_type = other RNA
ggaagatggcatttct

SEQ ID NO: 471 - RNA, 16 nt, synthetic construct
  misc_feature 1..16: note = Antisense oligonucleotide
  modified_base 1: mod_base = OTHER; note = misc_feature - bicyclic nucleic acid scaffold modification
  source 1..16: mol_type = other RNA
ggaagatggcatttct

SEQ ID NO: 472 - RNA, 16 nt, synthetic construct
  modified_base 16: mod_base = OTHER; note = thymine
  misc_feature 1..16: note = Antisense oligonucleotide
  modified_base 16: mod_base = OTHER; note = misc_feature - bicyclic nucleic acid scaffold modification
  source 1..16: mol_type = other RNA
ggaagatggcatttct

SEQ ID NO: 473 - RNA, 16 nt, synthetic construct
  modified_base 16: mod_base = OTHER; note = thymine
  misc_feature 1..16: note = Antisense oligonucleotide
  modified_base 1: mod_base = OTHER; note = misc_feature - bicyclic nucleic acid scaffold modification
  modified_base 16: mod_base = OTHER; note = misc_feature - bicyclic nucleic acid scaffold modification
  source 1..16: mol_type = other RNA
ggaagatggcatttct

SEQ ID NO: 474 - RNA, 16 nt, synthetic construct
  misc_feature 1..16: note = Antisense oligonucleotide
  modified_base 1..2: mod_base = OTHER; note = misc_feature - bicyclic nucleic acid scaffold modification
  source 1..16: mol_type = other RNA
ggaagatggcatttct

SEQ ID NO: 475 - RNA, 16 nt, synthetic construct
  modified_base 16: mod_base = OTHER; note = thymine
  misc_feature 1..16: note = Antisense oligonucleotide
  modified_base 15..16: mod_base = OTHER; note = misc_feature - bicyclic nucleic acid scaffold modification
  source 1..16: mol_type = other RNA
ggaagatggcatttct

SEQ ID NO: 476 - RNA, 18 nt, synthetic construct
  misc_feature 1..18: note = Antisense oligonucleotide
  source 1..18: mol_type = other RNA
tcaaggaagatggcattt

SEQ ID NO: 477 - RNA, 18 nt, synthetic construct
  modified_base 1: mod_base = OTHER; note = thymine
  misc_feature 1..18: note = Antisense oligonucleotide
  modified_base 1: mod_base = OTHER; note = misc_feature - bicyclic nucleic acid scaffold modification
  source 1..18: mol_type = other RNA
tcaaggaagatggcattt

SEQ ID NO: 478 - RNA, 18 nt, synthetic construct
  modified_base 18: mod_base = OTHER; note = thymine
  misc_feature 1..18: note = Antisense oligonucleotide
  modified_base 18: mod_base = OTHER; note = misc_feature - bicyclic nucleic acid scaffold modification
  source 1..18: mol_type = other RNA
tcaaggaagatggcattt

SEQ ID NO: 479 - RNA, 18 nt, synthetic construct
  modified_base 1: mod_base = OTHER; note = thymine
  modified_base 18: mod_base = OTHER; note = thymine
  misc_feature 1..18: note = Antisense oligonucleotide
  modified_base 1: mod_base = OTHER; note = misc_feature - bicyclic nucleic acid scaffold modification
  modified_base 18: mod_base = OTHER; note = misc_feature - bicyclic nucleic acid scaffold modification
  source 1..18: mol_type = other RNA
tcaaggaagatggcattt

SEQ ID NO: 480 - RNA, 18 nt, synthetic construct
  modified_base 1: mod_base = OTHER; note = thymine
  misc_feature 1..18: note = Antisense oligonucleotide
  modified_base 1..2: mod_base = OTHER; note = misc_feature - bicyclic nucleic acid scaffold modification
  source 1..18: mol_type = other RNA
tcaaggaagatggcattt

SEQ ID NO: 481 - RNA, 18 nt, synthetic construct
  modified_base 17..18: mod_base = OTHER; note = thymine
  misc_feature 1..18: note = Antisense oligonucleotide
  modified_base 17..18: mod_base = OTHER; note = misc_feature - bicyclic nucleic acid scaffold modification
  source 1..18: mol_type = other RNA
tcaaggaagatggcattt

SEQ ID NO: 482 - RNA, 16 nt, synthetic construct
  misc_feature 1..16: note = Antisense oligonucleotide
  source 1..16: mol_type = other RNA
tcaaggaagatggcat

SEQ ID NO: 483 - RNA, 16 nt, synthetic construct
  modified_base 1: mod_base = OTHER; note = thymine
  misc_feature 1..16: note = Antisense oligonucleotide
  modified_base 1: mod_base = OTHER; note = misc_feature - bicyclic nucleic acid scaffold modification
  source 1..16: mol_type = other RNA
tcaaggaagatggcat

SEQ ID NO: 484 - RNA, 16 nt, synthetic construct
  modified_base 16: mod_base = OTHER; note = thymine
  misc_feature 1..16: note = Antisense oligonucleotide
  modified_base 16: mod_base = OTHER; note = misc_feature - bicyclic nucleic acid scaffold modification
  source 1..16: mol_type = other RNA
tcaaggaagatggcat

SEQ ID NO: 485 - RNA, 16 nt, synthetic construct
  modified_base 1: mod_base = OTHER; note = thymine
  modified_base 16: mod_base = OTHER; note = thymine
  misc_feature 1..16: note = Antisense oligonucleotide
  modified_base 1: mod_base = OTHER; note = misc_feature - bicyclic nucleic acid scaffold modification
  modified_base 16: mod_base = OTHER; note = misc_feature - bicyclic nucleic acid scaffold modification
  source 1..16: mol_type = other RNA
tcaaggaagatggcat

SEQ ID NO: 486 - RNA, 16 nt, synthetic construct
  modified_base 1: mod_base = OTHER; note = thymine
  misc_feature 1..16: note = Antisense oligonucleotide
  modified_base 1..2: mod_base = OTHER; note = misc_feature - bicyclic nucleic acid scaffold modification
  source 1..16: mol_type = other RNA
tcaaggaagatggcat

SEQ ID NO: 487 - RNA, 16 nt, synthetic construct
  modified_base 16: mod_base = OTHER; note = thymine
  misc_feature 1..16: note = Antisense oligonucleotide
  modified_base 15..16: mod_base = OTHER; note = misc_feature - bicyclic nucleic acid scaffold modification
  source 1..16: mol_type = other RNA
tcaaggaagatggcat

SEQ ID NO: 488 - RNA, 17 nt, synthetic construct
  misc_feature 1..17: note = Antisense oligonucleotide
  source 1..17: mol_type = other RNA
tggcatttctagtttgg

SEQ ID NO: 489 - RNA, 17 nt, synthetic construct
  modified_base 1: mod_base = OTHER; note = thymine
  misc_feature 1..17: note = Antisense oligonucleotide
  modified_base 1: mod_base = OTHER; note = misc_feature - bicyclic nucleic acid scaffold modification
  source 1..17: mol_type = other RNA
tggcatttctagtttgg

SEQ ID NO: 490 - RNA, 17 nt, synthetic construct
  misc_feature 1..17: note = Antisense oligonucleotide
  modified_base 17: mod_base = OTHER; note = misc_feature - bicyclic nucleic acid scaffold modification
  source 1..17: mol_type = other RNA
tggcatttctagtttgg

SEQ ID NO: 491 - RNA, 17 nt, synthetic construct
  modified_base 1: mod_base = OTHER; note = thymine
  misc_feature 1..17: note = Antisense oligonucleotide
  modified_base 1: mod_base = OTHER; note = misc_feature - bicyclic nucleic acid scaffold modification
  modified_base 17: mod_base = OTHER; note = misc_feature - bicyclic nucleic acid scaffold modification
  source 1..17: mol_type = other RNA
tggcatttctagtttgg

SEQ ID NO: 492 - RNA, 17 nt, synthetic construct
  modified_base 1: mod_base = OTHER; note = thymine
  misc_feature 1..17: note = Antisense oligonucleotide
  modified_base 1..2: mod_base = OTHER; note = misc_feature - bicyclic nucleic acid scaffold modification
  source 1..17: mol_type = other RNA
tggcatttctagtttgg

SEQ ID NO: 493 - RNA, 17 nt, synthetic construct
  misc_feature 1..17: note = Antisense oligonucleotide
  modified_base 16..17: mod_base = OTHER; note = misc_feature - bicyclic nucleic acid scaffold modification
  source 1..17: mol_type = other RNA
tggcatttctagtttgg

SEQ ID NO: 494 - RNA, 20 nt, synthetic construct
  misc_feature 1..20: note = Antisense oligonucleotide
  source 1..20: mol_type = other RNA
agatggcatttctagtttgg

SEQ ID NO: 495 - RNA, 20 nt, synthetic construct
  misc_feature 1..20: note = Antisense oligonucleotide
  modified_base 1: mod_base = OTHER; note = misc_feature - bicyclic nucleic acid scaffold modification
  source 1..20: mol_type = other RNA
agatggcatttctagtttgg

SEQ ID NO: 496 - RNA, 20 nt, synthetic construct
  misc_feature 1..20: note = Antisense oligonucleotide
  modified_base 20: mod_base = OTHER; note = misc_feature - bicyclic nucleic acid scaffold modification
  source 1..20: mol_type = other RNA
agatggcatttctagtttgg

SEQ ID NO: 497 - RNA, 20 nt, synthetic construct
  misc_feature 1..20: note = Antisense oligonucleotide
  modified_base 1: mod_base = OTHER; note = misc_feature - bicyclic nucleic acid scaffold modification
  modified_base 20: mod_base = OTHER; note = misc_feature - bicyclic nucleic acid scaffold modification
  source 1..20: mol_type = other RNA
agatggcatttctagtttgg

SEQ ID NO: 498 - RNA, 20 nt, synthetic construct
  misc_feature 1..20: note = Antisense oligonucleotide
  modified_base 1..2: mod_base = OTHER; note = misc_feature - bicyclic nucleic acid scaffold modification
  source 1..20: mol_type = other RNA
agatggcatttctagtttgg

SEQ ID NO: 499 - RNA, 20 nt, synthetic construct
  misc_feature 1..20: note = Antisense oligonucleotide
  modified_base 19..20: mod_base = OTHER; note = misc_feature - bicyclic nucleic acid scaffold modification
  source 1..20: mol_type = other RNA
agatggcatttctagtttgg

SEQ ID NO: 500 - RNA, 22 nt, synthetic construct
  misc_feature 1..22: note = Antisense oligonucleotide
  source 1..22: mol_type = other RNA
catcaaggaagatggcatttct

SEQ ID NO: 501 - RNA, 22 nt, synthetic construct
  misc_feature 1..22: note = Antisense oligonucleotide
  modified_base 1: mod_base = OTHER; note = misc_feature - bicyclic nucleic acid scaffold modification
  source 1..22: mol_type = other RNA
catcaaggaagatggcatttct

SEQ ID NO: 502 - RNA, 22 nt, synthetic construct
  modified_base 22: mod_base = OTHER; note = thymine
  misc_feature 1..22: note = Antisense oligonucleotide
  modified_base 22: mod_base = OTHER; note = misc_feature - bicyclic nucleic acid scaffold modification
  source 1..22: mol_type = other RNA
catcaaggaagatggcatttct

SEQ ID NO: 503 - RNA, 22 nt, synthetic construct
  modified_base 22: mod_base = OTHER; note = thymine
  misc_feature 1..22: note = Antisense oligonucleotide
  modified_base 1: mod_base = OTHER; note = misc_feature - bicyclic nucleic acid scaffold modification
  modified_base 22: mod_base = OTHER; note = misc_feature - bicyclic nucleic acid scaffold modification
  source 1..22: mol_type = other RNA
catcaaggaagatggcatttct

SEQ ID NO: 504 - RNA, 22 nt, synthetic construct
  misc_feature 1..22: note = Antisense oligonucleotide
  modified_base 1..2: mod_base = OTHER; note = misc_feature - bicyclic nucleic acid scaffold modification
  source 1..22: mol_type = other RNA
catcaaggaagatggcatttct

SEQ ID NO: 505 - RNA, 22 nt, synthetic construct
  modified_base 22: mod_base = OTHER; note = thymine
  misc_feature 1..22: note = Antisense oligonucleotide
  modified_base 21..22: mod_base = OTHER; note = misc_feature - bicyclic nucleic acid scaffold modification
  source 1..22: mol_type = other RNA
catcaaggaagatggcatttct

SEQ ID NO: 506 - RNA, 20 nt, synthetic construct
  misc_feature 1..20: note = Antisense oligonucleotide
  source 1..20: mol_type = other RNA
catcaaggaagatggcattt

SEQ ID NO: 507 - RNA, 20 nt, synthetic construct
  misc_feature 1..20: note = Antisense oligonucleotide
  modified_base 1: mod_base = OTHER; note = misc_feature - bicyclic nucleic acid scaffold modification
  source 1..20: mol_type = other RNA
catcaaggaagatggcattt

SEQ ID NO: 508 - RNA, 20 nt, synthetic construct
  modified_base 20: mod_base = OTHER; note = thymine
  misc_feature 1..20: note = Antisense oligonucleotide
  modified_base 20: mod_base = OTHER; note = misc_feature - bicyclic nucleic acid scaffold modification
  source 1..20: mol_type = other RNA
catcaaggaagatggcattt

SEQ ID NO: 509 - RNA, 20 nt, synthetic construct
  modified_base 20: mod_base = OTHER; note = thymine
  misc_feature 1..20: note = Antisense oligonucleotide
  modified_base 1: mod_base = OTHER; note = misc_feature - bicyclic nucleic acid scaffold modification
  modified_base 20: mod_base = OTHER; note = misc_feature - bicyclic nucleic acid scaffold modification
  source 1..20: mol_type = other RNA
catcaaggaagatggcattt

SEQ ID NO: 510 - RNA, 20 nt, synthetic construct
  misc_feature 1..20: note = Antisense oligonucleotide
  modified_base 1..2: mod_base = OTHER; note = misc_feature - bicyclic nucleic acid scaffold modification
  source 1..20: mol_type = other RNA
catcaaggaagatggcattt

SEQ ID NO: 511 - RNA, 20 nt, synthetic construct
  modified_base 19..20: mod_base = OTHER; note = thymine
  misc_feature 1..20: note = Antisense oligonucleotide
  modified_base 19..20: mod_base = OTHER; note = misc_feature - bicyclic nucleic acid scaffold modification
  source 1..20: mol_type = other RNA
catcaaggaagatggcattt

SEQ ID NO: 512 - RNA, 18 nt, synthetic construct
  misc_feature 1..18: note = Antisense oligonucleotide
  source 1..18: mol_type = other RNA
catcaaggaagatggcat

SEQ ID NO: 513 - RNA, 18 nt, synthetic construct
  misc_feature 1..18: note = Antisense oligonucleotide
  modified_base 1: mod_base = OTHER; note = misc_feature - bicyclic nucleic acid scaffold modification
  source 1..18: mol_type = other RNA
catcaaggaagatggcat

SEQ ID NO: 514 - RNA, 18 nt, synthetic construct
  modified_base 18: mod_base = OTHER; note = thymine
  misc_feature 1..18: note = Antisense oligonucleotide
  modified_base 18: mod_base = OTHER; note = misc_feature - bicyclic nucleic acid scaffold modification
  source 1..18: mol_type = other RNA
catcaaggaagatggcat

SEQ ID NO: 515 - RNA, 18 nt, synthetic construct
  modified_base 18: mod_base = OTHER; note = thymine
  misc_feature 1..18: note = Antisense oligonucleotide
  modified_base 1: mod_base = OTHER; note = misc_feature - bicyclic nucleic acid scaffold modification
  modified_base 18: mod_base = OTHER; note = misc_feature - bicyclic nucleic acid scaffold modification
  source 1..18: mol_type = other RNA
catcaaggaagatggcat

SEQ ID NO: 516 - RNA, 18 nt, synthetic construct
  misc_feature 1..18: note = Antisense oligonucleotide
  modified_base 1..2: mod_base = OTHER; note = misc_feature - bicyclic nucleic acid scaffold modification
  source 1..18: mol_type = other RNA
catcaaggaagatggcat

SEQ ID NO: 517 - RNA, 18 nt, synthetic construct
  modified_base 18: mod_base = OTHER; note = thymine
  misc_feature 1..18: note = Antisense oligonucleotide
  modified_base 17..18: mod_base = OTHER; note = misc_feature - bicyclic nucleic acid scaffold modification
  source 1..18: mol_type = other RNA
catcaaggaagatggcat

SEQ ID NO: 518 - RNA, 25 nt, synthetic construct
  misc_feature 1..25: note = Antisense oligonucleotide
  source 1..25: mol_type = other RNA
caacatcaaggaagatggcatttct

SEQ ID NO: 519 - RNA, 25 nt, synthetic construct
  misc_feature 1..25: note = Antisense oligonucleotide
  modified_base 1: mod_base = OTHER; note = misc_feature - bicyclic nucleic acid scaffold modification
  source 1..25: mol_type = other RNA
caacatcaaggaagatggcatttct

SEQ ID NO: 520 - RNA, 25 nt, synthetic construct
  modified_base 25: mod_base = OTHER; note = thymine
  misc_feature 1..25: note = Antisense oligonucleotide
  modified_base 25: mod_base = OTHER; note = misc_feature - bicyclic nucleic acid scaffold modification
  source 1..25: mol_type = other RNA
caacatcaaggaagatggcatttct

SEQ ID NO: 521 - RNA, 25 nt, synthetic construct
  modified_base 25: mod_base = OTHER; note = thymine
  misc_feature 1..25: note = Antisense oligonucleotide
  modified_base 1: mod_base = OTHER; note = misc_feature - bicyclic nucleic acid scaffold modification
  modified_base 25: mod_base = OTHER; note = misc_feature - bicyclic nucleic acid scaffold modification
  source 1..25: mol_type = other RNA
caacatcaaggaagatggcatttct

SEQ ID NO: 522 - RNA, 25 nt, synthetic construct
  misc_feature 1..25: note = Antisense oligonucleotide
  modified_base 1..2: mod_base = OTHER; note = misc_feature - bicyclic nucleic acid scaffold modification
  source 1..25: mol_type = other RNA
caacatcaaggaagatggcatttct

SEQ ID NO: 523 - RNA, 25 nt, synthetic construct
  modified_base 25: mod_base = OTHER; note = thymine
  misc_feature 1..25: note = Antisense oligonucleotide
  modified_base 24..25: mod_base = OTHER; note = misc_feature - bicyclic nucleic acid scaffold modification
  source 1..25: mol_type = other RNA
caacatcaaggaagatggcatttct

SEQ ID NO: 524 - RNA, 16 nt, synthetic construct
  misc_feature 1..16: note = Antisense oligonucleotide
  source 1..16: mol_type = other RNA
aaggaagatggcattt

SEQ ID NO: 525 - RNA, 16 nt, synthetic construct
  misc_feature 1..16: note = Antisense oligonucleotide
  modified_base 1: mod_base = OTHER; note = misc_feature - bicyclic nucleic acid scaffold modification
  source 1..16: mol_type = other RNA
aaggaagatggcattt

SEQ ID NO: 526 - RNA, 16 nt, synthetic construct
  modified_base 16: mod_base = OTHER; note = thymine
  misc_feature 1..16: note = Antisense oligonucleotide
  modified_base 16: mod_base = OTHER; note = misc_feature - bicyclic nucleic acid scaffold modification
  source 1..16: mol_type = other RNA
aaggaagatggcattt

SEQ ID NO: 527 - RNA, 16 nt, synthetic construct
  modified_base 16: mod_base = OTHER; note = thymine
  misc_feature 1..16: note = Antisense oligonucleotide
  modified_base 1: mod_base = OTHER; note = misc_feature - bicyclic nucleic acid scaffold modification
  modified_base 16: mod_base = OTHER; note = misc_feature - bicyclic nucleic acid scaffold modification
  source 1..16: mol_type = other RNA
aaggaagatggcattt

SEQ ID NO: 528 - RNA, 16 nt, synthetic construct
  misc_feature 1..16: note = Antisense oligonucleotide
  modified_base 1..2: mod_base = OTHER; note = misc_feature - bicyclic nucleic acid scaffold modification
  source 1..16: mol_type = other RNA
aaggaagatggcattt

SEQ ID NO: 529 - RNA, 16 nt, synthetic construct
  modified_base 15..16: mod_base = OTHER; note = thymine
  misc_feature 1..16: note = Antisense oligonucleotide
  modified_base 15..16: mod_base = OTHER; note = misc_feature - bicyclic nucleic acid scaffold modification
  source 1..16: mol_type = other RNA
aaggaagatggcattt

SEQ ID NO: 530 - RNA, 16 nt, synthetic construct
  misc_feature 1..16: note = Antisense oligonucleotide
  source 1..16: mol_type = other RNA
aggaagatggcatttc

SEQ ID NO: 531 - RNA, 16 nt, synthetic construct
  misc_feature 1..16: note = Antisense oligonucleotide
  modified_base 1: mod_base = OTHER; note = misc_feature - bicyclic nucleic acid scaffold modification
  source 1..16: mol_type = other RNA
aggaagatggcatttc

SEQ ID NO: 532 - RNA, 16 nt, synthetic construct
  misc_feature 1..16: note = Antisense oligonucleotide
  modified_base 16: mod_base = OTHER; note = misc_feature - bicyclic nucleic acid scaffold modification
  source 1..16: mol_type = other RNA
aggaagatggcatttc

SEQ ID NO: 533 - RNA, 16 nt, synthetic construct
  misc_feature 1..16: note = Antisense oligonucleotide
  modified_base 1: mod_base = OTHER; note = misc_feature - bicyclic nucleic acid scaffold modification
  modified_base 16: mod_base = OTHER; note = misc_feature - bicyclic nucleic acid scaffold modification
  source 1..16: mol_type = other RNA
aggaagatggcatttc

SEQ ID NO: 534 - RNA, 16 nt, synthetic construct
  misc_feature 1..16: note = Antisense oligonucleotide
  modified_base 1..2: mod_base = OTHER; note = misc_feature - bicyclic nucleic acid scaffold modification
  source 1..16: mol_type = other RNA
aggaagatggcatttc

SEQ ID NO: 535 - RNA, 16 nt, synthetic construct
  modified_base 15: mod_base = OTHER; note = thymine
  misc_feature 1..16: note = Antisense oligonucleotide
  modified_base 15..16: mod_base = OTHER; note = misc_feature - bicyclic nucleic acid scaffold modification
  source 1..16: mol_type = other RNA
aggaagatggcatttc

SEQ ID NO: 536 - RNA, 19 nt, synthetic construct
  misc_feature 1..19: note = Antisense oligonucleotide
  source 1..19: mol_type = other RNA
caaggaagatggcatttct

SEQ ID NO: 537 - RNA, 19 nt, synthetic construct
  misc_feature 1..19: note = Antisense oligonucleotide
  modified_base 1: mod_base = OTHER; note = misc_feature - bicyclic nucleic acid scaffold modification
  source 1..19: mol_type = other RNA
caaggaagatggcatttct

SEQ ID NO: 538 - RNA, 19 nt, synthetic construct
  modified_base 19: mod_base = OTHER; note = thymine
  misc_feature 1..19: note = Antisense oligonucleotide
  modified_base 19: mod_base = OTHER; note = misc_feature - bicyclic nucleic acid scaffold modification
  source 1..19: mol_type = other RNA
caaggaagatggcatttct

SEQ ID NO: 539 - RNA, 19 nt, synthetic construct
  modified_base 19: mod_base = OTHER; note = thymine
  misc_feature 1..19: note = Antisense oligonucleotide
  modified_base 1: mod_base = OTHER; note = misc_feature - bicyclic nucleic acid scaffold modification
  modified_base 19: mod_base = OTHER; note = misc_feature - bicyclic nucleic acid scaffold modification
  source 1..19: mol_type = other RNA
caaggaagatggcatttct

SEQ ID NO: 540 - RNA, 19 nt, synthetic construct
  misc_feature 1..19: note = Antisense oligonucleotide
  modified_base 1..2: mod_base = OTHER; note = misc_feature - bicyclic nucleic acid scaffold modification
  source 1..19: mol_type = other RNA
caaggaagatggcatttct

SEQ ID NO: 541 - RNA, 19 nt, synthetic construct
  modified_base 19: mod_base = OTHER; note = thymine
  misc_feature 1..19: note = Antisense oligonucleotide
  modified_base 18..19: mod_base = OTHER; note = misc_feature - bicyclic nucleic acid scaffold modification
  source 1..19: mol_type = other RNA
caaggaagatggcatttct

SEQ ID NO: 542 - RNA, 17 nt, synthetic construct
  misc_feature 1..17: note = Antisense oligonucleotide
  source 1..17: mol_type = other RNA
aggaagatggcatttct

SEQ ID NO: 543 - RNA, 17 nt, synthetic construct
  misc_feature 1..17: note = Antisense oligonucleotide
  modified_base 1: mod_base = OTHER; note = misc_feature - bicyclic nucleic acid scaffold modification
  source 1..17: mol_type = other RNA
aggaagatggcatttct

SEQ ID NO: 544 - RNA, 17 nt, synthetic construct
  modified_base 17: mod_base = OTHER; note = thymine
  misc_feature 1..17: note = Antisense oligonucleotide
  modified_base 17: mod_base = OTHER; note = misc_feature - bicyclic nucleic acid scaffold modification
  source 1..17: mol_type = other RNA
aggaagatggcatttct

SEQ ID NO: 545 - RNA, 17 nt, synthetic construct
  modified_base 17: mod_base = OTHER; note = thymine
  misc_feature 1..17: note = Antisense oligonucleotide
  modified_base 1: mod_base = OTHER; note = misc_feature - bicyclic nucleic acid scaffold modification
  modified_base 17: mod_base = OTHER; note = misc_feature - bicyclic nucleic acid scaffold modification
  source 1..17: mol_type = other RNA
aggaagatggcatttct

SEQ ID NO: 546 - RNA, 17 nt, synthetic construct
  misc_feature 1..17: note = Antisense oligonucleotide
  modified_base 1..2: mod_base = OTHER; note = misc_feature - bicyclic nucleic acid scaffold modification
  source 1..17: mol_type = other RNA
aggaagatggcatttct

SEQ ID NO: 547 - RNA, 17 nt, synthetic construct
  modified_base 17: mod_base = OTHER; note = thymine
  misc_feature 1..17: note = Antisense oligonucleotide
  modified_base 16..17: mod_base = OTHER; note = misc_feature - bicyclic nucleic acid scaffold modification
  source 1..17: mol_type = other RNA
aggaagatggcatttct

SEQ ID NO: 548 - RNA, 23 nt, synthetic construct
  misc_feature 1..23: note = Antisense oligonucleotide
  source 1..23: mol_type = other RNA
ccagagcaggtacctccaacatc

SEQ ID NO: 549 - RNA, 23 nt, synthetic construct
  misc_feature 1..23: note = Antisense oligonucleotide
  modified_base 1: mod_base = OTHER; note = misc_feature - bicyclic nucleic acid scaffold modification
  source 1..23: mol_type = other RNA
ccagagcaggtacctccaacatc

SEQ ID NO: 550 - RNA, 23 nt, synthetic construct
  misc_feature 1..23: note = Antisense oligonucleotide
  modified_base 23: mod_base = OTHER; note = misc_feature - bicyclic nucleic acid scaffold modification
  source 1..23: mol_type = other RNA
ccagagcaggtacctccaacatc

SEQ ID NO: 551 - RNA, 23 nt, synthetic construct
  misc_feature 1..23: note = Antisense oligonucleotide
  modified_base 1: mod_base = OTHER; note = misc_feature - bicyclic nucleic acid scaffold modification
  modified_base 23: mod_base = OTHER; note = misc_feature - bicyclic nucleic acid scaffold modification
  source 1..23: mol_type = other RNA
ccagagcaggtacctccaacatc

SEQ ID NO: 552 - RNA, 23 nt, synthetic construct
  misc_feature 1..23: note = Antisense oligonucleotide
  modified_base 1..2: mod_base = OTHER; note = misc_feature - bicyclic nucleic acid scaffold modification
  source 1..23: mol_type = other RNA
ccagagcaggtacctccaacatc

SEQ ID NO: 553 - RNA, 23 nt, synthetic construct
  modified_base 22: mod_base = OTHER; note = thymine
  misc_feature 1..23: note = Antisense oligonucleotide
  modified_base 22..23: mod_base = OTHER; note = misc_feature - bicyclic nucleic acid scaffold modification
  source 1..23: mol_type = other RNA
ccagagcaggtacctccaacatc

SEQ ID NO: 554 - RNA, 18 nt, synthetic construct
  misc_feature 1..18: note = Antisense oligonucleotide
  source 1..18: mol_type = other RNA
ccagagcaggtacctcca

SEQ ID NO: 555 - RNA, 18 nt, synthetic construct
  misc_feature 1..18: note = Antisense oligonucleotide
  modified_base 1: mod_base = OTHER; note = misc_feature - bicyclic nucleic acid scaffold modification
  source 1..18: mol_type = other RNA
ccagagcaggtacctcca

SEQ ID NO: 556 - RNA, 18 nt, synthetic construct
  misc_feature 1..18: note = Antisense oligonucleotide
  modified_base 18: mod_base = OTHER; note = misc_feature - bicyclic nucleic acid scaffold modification
  source 1..18: mol_type = other RNA
ccagagcaggtacctcca

SEQ ID NO: 557 - RNA, 18 nt, synthetic construct
  misc_feature 1..18: note = Antisense oligonucleotide
  modified_base 1: mod_base = OTHER; note = misc_feature - bicyclic nucleic acid scaffold modification
  modified_base 18: mod_base = OTHER; note = misc_feature - bicyclic nucleic acid scaffold modification
  source 1..18: mol_type = other RNA
ccagagcaggtacctcca

SEQ ID NO: 558 - RNA, 18 nt, synthetic construct
  misc_feature 1..18: note = Antisense oligonucleotide
  modified_base 1..2: mod_base = OTHER; note = misc_feature - bicyclic nucleic acid scaffold modification
  source 1..18: mol_type = other RNA
ccagagcaggtacctcca

SEQ ID NO: 559 - RNA, 18 nt, synthetic construct
  misc_feature 1..18: note = Antisense oligonucleotide
  modified_base 17..18: mod_base = OTHER; note = misc_feature - bicyclic nucleic acid scaffold modification
  source 1..18: mol_type = other RNA
ccagagcaggtacctcca

SEQ ID NO: 560 - RNA, 23 nt, synthetic construct
  misc_feature 1..23: note = Antisense oligonucleotide
  source 1..23: mol_type = other RNA
cctctgtgattttataacttgat

SEQ ID NO: 561 - RNA, 23 nt, synthetic construct
  misc_feature 1..23: note = Antisense oligonucleotide
  modified_base 1: mod_base = OTHER; note = misc_feature - bicyclic nucleic acid scaffold modification
  source 1..23: mol_type = other RNA
cctctgtgattttataacttgat

SEQ ID NO: 562 - RNA, 23 nt, synthetic construct
  modified_base 23: mod_base = OTHER; note = thymine
  misc_feature 1..23: note = Antisense oligonucleotide
  modified_base 23: mod_base = OTHER; note = misc_feature - bicyclic nucleic acid scaffold modification
  source 1..23: mol_type = other RNA
cctctgtgattttataacttgat

SEQ ID NO: 563 - RNA, 23 nt, synthetic construct
  modified_base 23: mod_base = OTHER; note = thymine
  misc_feature 1..23: note = Antisense oligonucleotide
  modified_base 1: mod_base = OTHER; note = misc_feature - bicyclic nucleic acid scaffold modification
  modified_base 23: mod_base = OTHER; note = misc_feature - bicyclic nucleic acid scaffold modification
  source 1..23: mol_type = other RNA
cctctgtgattttataacttgat

SEQ ID NO: 564 - RNA, 23 nt, synthetic construct
  misc_feature 1..23: note = Antisense oligonucleotide
  modified_base 1..2: mod_base = OTHER; note = misc_feature - bicyclic nucleic acid scaffold modification
  source 1..23: mol_type = other RNA
cctctgtgattttataacttgat

SEQ ID NO: 565 - RNA, 23 nt, synthetic construct
  modified_base 23: mod_base = OTHER; note = thymine
  misc_feature 1..23: note = Antisense oligonucleotide
  modified_base 22..23: mod_base = OTHER; note = misc_feature - bicyclic nucleic acid scaffold modification
  source 1..23: mol_type = other RNA
cctctgtgattttataacttgat

SEQ ID NO: 566 - RNA, 17 nt, synthetic construct
  misc_feature 1..17: note = Antisense oligonucleotide
  source 1..17: mol_type = other RNA
tcacccaccatcaccct

SEQ ID NO: 567 - RNA, 17 nt, synthetic construct
  modified_base 1: mod_base = OTHER; note = thymine
  misc_feature 1..17: note = Antisense oligonucleotide
  modified_base 1: mod_base = OTHER; note = misc_feature - bicyclic nucleic acid scaffold modification
  source 1..17: mol_type = other RNA
tcacccaccatcaccct

SEQ ID NO: 568 - RNA, 17 nt, synthetic construct
  modified_base 17: mod_base = OTHER; note = thymine
  misc_feature 1..17: note = Antisense oligonucleotide
  modified_base 17: mod_base = OTHER; note = misc_feature - bicyclic nucleic acid scaffold modification
  source 1..17: mol_type = other RNA
tcacccaccatcaccct

SEQ ID NO: 569 - RNA, 17 nt, synthetic construct
  modified_base 1: mod_base = OTHER; note = thymine
  modified_base 17: mod_base = OTHER; note = thymine
  misc_feature 1..17: note = Antisense oligonucleotide
  modified_base 1: mod_base = OTHER; note = misc_feature - bicyclic nucleic acid scaffold modification
  modified_base 17: mod_base = OTHER; note = misc_feature - bicyclic nucleic acid scaffold modification
  source 1..17: mol_type = other RNA
tcacccaccatcaccct

SEQ ID NO: 570 - RNA, 17 nt, synthetic construct
  modified_base 1: mod_base = OTHER; note = thymine
  misc_feature 1..17: note = Antisense oligonucleotide
  modified_base 1..2: mod_base = OTHER; note = misc_feature - bicyclic nucleic acid scaffold modification
  source 1..17: mol_type = other RNA
tcacccaccatcaccct

SEQ ID NO: 571 - RNA, 17 nt, synthetic construct
  modified_base 17: mod_base = OTHER; note = thymine
  misc_feature 1..17: note = Antisense oligonucleotide
  modified_base 16..17: mod_base = OTHER; note = misc_feature - bicyclic nucleic acid scaffold modification
  source 1..17: mol_type = other RNA
tcacccaccatcaccct

SEQ ID NO: 572 - RNA, 20 nt, synthetic construct
  misc_feature 1..20: note = Antisense oligonucleotide
  source 1..20: mol_type = other RNA
tgatatcctcaaggtcaccc

SEQ ID NO: 573 - RNA, 20 nt, synthetic construct
  misc_feature 1..20: note = Antisense oligonucleotide
  modified_base 1: mod_base = OTHER; note = misc_feature - bicyclic nucleic acid scaffold modification
  source 1..20: mol_type = other RNA
tgatatcctcaaggtcaccc

SEQ ID NO: 574 - RNA, 20 nt, synthetic construct
  modified_base 1: mod_base = OTHER; note = thymine
  misc_feature 1..20: note = Antisense oligonucleotide
  modified_base 20: mod_base = OTHER; note = misc_feature - bicyclic nucleic acid scaffold modification
  source 1..20: mol_type = other RNA
tgatatcctcaaggtcaccc

SEQ ID NO: 575 - RNA, 20 nt, synthetic construct
  modified_base 1: mod_base = OTHER; note = thymine
  misc_feature 1..20: note = Antisense oligonucleotide
  modified_base 1: mod_base = OTHER; note = misc_feature - bicyclic nucleic acid scaffold modification
  modified_base 20: mod_base = OTHER; note = misc_feature - bicyclic nucleic acid scaffold modification
  source 1..20: mol_type = other RNA
tgatatcctcaaggtcaccc

SEQ ID NO: 576 - RNA, 20 nt, synthetic construct
  modified_base 1: mod_base = OTHER; note = thymine
  misc_feature 1..20: note = Antisense oligonucleotide
  modified_base 1..2: mod_base = OTHER; note = misc_feature - bicyclic nucleic acid scaffold modification
  source 1..20: mol_type = other RNA
tgatatcctcaaggtcaccc

SEQ ID NO: 577 - RNA, 20 nt, synthetic construct
  misc_feature 1..20: note = Antisense oligonucleotide
  modified_base 19..20: mod_base = OTHER; note = misc_feature - bicyclic nucleic acid scaffold modification
  source 1..20: mol_type = other RNA
tgatatcctcaaggtcaccc

SEQ ID NO: 578 - RNA, 22 nt, synthetic construct
  misc_feature 1..22: note = Antisense oligonucleotide
  source 1..22: mol_type = other RNA
ctgcttgatgatcatctcgttg

SEQ ID NO: 579 - RNA, 22 nt, synthetic construct
  misc_feature 1..22: note = Antisense oligonucleotide
  modified_base 1: mod_base = OTHER; note = misc_feature - bicyclic nucleic acid scaffold modification
  source 1..22: mol_type = other RNA
ctgcttgatgatcatctcgttg

SEQ ID NO: 580 - RNA, 22 nt, synthetic construct
  misc_feature 1..22: note = Antisense oligonucleotide
  modified_base 22: mod_base = OTHER; note = misc_feature - bicyclic nucleic acid scaffold modification
  source 1..22: mol_type = other RNA
ctgcttgatgatcatctcgttg

SEQ ID NO: 581 - RNA, 22 nt, synthetic construct
  misc_feature 1..22: note = Antisense oligonucleotide
  modified_base 1: mod_base = OTHER; note = misc_feature - bicyclic nucleic acid scaffold modification
  modified_base 22: mod_base = OTHER; note = misc_feature - bicyclic nucleic acid scaffold modification
  source 1..22: mol_type = other RNA
ctgcttgatgatcatctcgttg

SEQ ID NO: 582 - RNA, 22 nt, synthetic construct
  modified_base 2: mod_base = OTHER; note = thymine
  misc_feature 1..22: note = Antisense oligonucleotide
  modified_base 1..2: mod_base = OTHER; note = misc_feature - bicyclic nucleic acid scaffold modification
  source 1..22: mol_type = other RNA
ctgcttgatgatcatctcgttg

SEQ ID NO: 583 - RNA, 22 nt, synthetic construct
  modified_base 21: mod_base = OTHER; note = thymine
  misc_feature 1..22: note = Antisense oligonucleotide
  modified_base 21..22: mod_base = OTHER; note = misc_feature - bicyclic nucleic acid scaffold modification
  source 1..22: mol_type = other RNA
ctgcttgatgatcatctcgttg

SEQ ID NO: 584 - RNA, 18 nt, synthetic construct
  misc_feature 1..18: note = Antisense oligonucleotide
  source 1..18: mol_type = other RNA
ctgcttgatgatcatctc

SEQ ID NO: 585 - RNA, 18 nt, synthetic construct
  misc_feature 1..18: note = Antisense oligonucleotide
  modified_base 1: mod_base = OTHER; note = misc_feature - bicyclic nucleic acid scaffold modification
  source 1..18: mol_type = other RNA
ctgcttgatgatcatctc

SEQ ID NO: 586 - RNA, 18 nt, synthetic construct
  misc_feature 1..18: note = Antisense oligonucleotide
  modified_base 18: mod_base = OTHER; note = misc_feature - bicyclic nucleic acid scaffold modification
  source 1..18: mol_type = other RNA
ctgcttgatgatcatctc

SEQ ID NO: 587 - RNA, 18 nt, synthetic construct
  misc_feature 1..18: note = Antisense oligonucleotide
  modified_base 1: mod_base = OTHER; note = misc_feature - bicyclic nucleic acid scaffold modification
  modified_base 18: mod_base = OTHER; note = misc_feature - bicyclic nucleic acid scaffold modification
  source 1..18: mol_type = other RNA
ctgcttgatgatcatctc

SEQ ID NO: 588 - RNA, 18 nt, synthetic construct
  modified_base 2: mod_base = OTHER; note = thymine
  misc_feature 1..18: note = Antisense oligonucleotide
  modified_base 1..2: mod_base = OTHER; note = misc_feature - bicyclic nucleic acid scaffold modification
  source 1..18: mol_type = other RNA
ctgcttgatgatcatctc

SEQ ID NO: 589 - RNA, 18 nt, synthetic construct
  modified_base 17: mod_base = OTHER; note = thymine
  misc_feature 1..18: note = Antisense oligonucleotide
  modified_base 17..18: mod_base = OTHER; note = misc_feature - bicyclic nucleic acid scaffold modification
  source 1..18: mol_type = other RNA
ctgcttgatgatcatctc

SEQ ID NO: 590 - RNA, 18 nt, synthetic construct
  misc_feature 1..18: note = Antisense oligonucleotide
  source 1..18: mol_type = other RNA
ggtaagttctgtccaagc

SEQ ID NO: 591 - RNA, 18 nt, synthetic construct
  misc_feature 1..18: note = Antisense oligonucleotide
  modified_base 1: mod_base = OTHER; note = misc_feature - bicyclic nucleic acid scaffold modification
  source 1..18: mol_type = other RNA
ggtaagttctgtccaagc

SEQ ID NO: 592 - RNA, 18 nt, synthetic construct
  misc_feature 1..18: note = Antisense oligonucleotide
  modified_base 18: mod_base = OTHER; note = misc_feature - bicyclic nucleic acid scaffold modification
  source 1..18: mol_type = other RNA
ggtaagttctgtccaagc

SEQ ID NO: 593 - RNA, 18 nt, synthetic construct
  misc_feature 1..18: note = Antisense oligonucleotide
  modified_base 1: mod_base = OTHER; note = misc_feature - bicyclic nucleic acid scaffold modification
  modified_base 18: mod_base = OTHER; note = misc_feature - bicyclic nucleic acid scaffold modification
  source 1..18: mol_type = other RNA
ggtaagttctgtccaagc

SEQ ID NO: 594 - RNA, 18 nt, synthetic construct
  misc_feature 1..18: note = Antisense oligonucleotide
  modified_base 1..2: mod_base = OTHER; note = misc_feature - bicyclic nucleic acid scaffold modification
  source 1..18: mol_type = other RNA
ggtaagttctgtccaagc

SEQ ID NO: 595 - RNA, 18 nt, synthetic construct
  misc_feature 1..18: note = Antisense oligonucleotide
  modified_base 17..18: mod_base = OTHER; note = misc_feature - bicyclic nucleic acid scaffold modification
  source 1..18: mol_type = other RNA
ggtaagttctgtccaagc

SEQ ID NO: 596 - RNA, 16 nt, synthetic construct
  misc_feature 1..16: note = Antisense oligonucleotide
  source 1..16: mol_type = other RNA
gtaagttctgtccaag

SEQ ID NO: 597 - RNA, 16 nt, synthetic construct
  misc_feature 1..16: note = Antisense oligonucleotide
  modified_base 1: mod_base = OTHER; note = misc_feature - bicyclic nucleic acid scaffold modification
  source 1..16: mol_type = other RNA
gtaagttctgtccaag

SEQ ID NO: 598 - RNA, 16 nt, synthetic construct
  misc_feature 1..16: note = Antisense oligonucleotide
  modified_base 16: mod_base = OTHER; note = misc_feature - bicyclic nucleic acid scaffold modification
  source 1..16: mol_type = other RNA
gtaagttctgtccaag

SEQ ID NO: 599 - RNA, 16 nt, synthetic construct
  misc_feature 1..16: note = Antisense oligonucleotide
  modified_base 1: mod_base = OTHER; note = misc_feature - bicyclic nucleic acid scaffold modification
  modified_base 16: mod_base = OTHER; note = misc_feature - bicyclic nucleic acid scaffold modification
  source 1..16: mol_type = other RNA
gtaagttctgtccaag

SEQ ID NO: 600 - RNA, 16 nt, synthetic construct
  modified_base 2: mod_base = OTHER; note = thymine
  misc_feature 1..16: note = Antisense oligonucleotide
  modified_base 1..2: mod_base = OTHER; note = misc_feature - bicyclic nucleic acid scaffold modification
  source 1..16: mol_type = other RNA
gtaagttctgtccaag

SEQ ID NO: 601 - RNA, 16 nt, synthetic construct
  misc_feature 1..16: note = Antisense oligonucleotide
  modified_base 15..16: mod_base = OTHER; note = misc_feature - bicyclic nucleic acid scaffold modification
  source 1..16: mol_type = other RNA
gtaagttctgtccaag

SEQ ID NO: 602 - RNA, 19 nt, synthetic construct
  misc_feature 1..19: note = Antisense oligonucleotide
  source 1..19: mol_type = other RNA
gtttccttagtaaccacag

SEQ ID NO: 603 - RNA, 19 nt, synthetic construct
  misc_feature 1..19: note = Antisense oligonucleotide
  modified_base 1: mod_base = OTHER; note = misc_feature - bicyclic nucleic acid scaffold modification
  source 1..19: mol_type = other RNA
gtttccttagtaaccacag

SEQ ID NO: 604 - RNA, 19 nt, synthetic construct
  misc_feature 1..19: note = Antisense oligonucleotide
  modified_base 19: mod_base = OTHER; note = misc_feature - bicyclic nucleic acid scaffold modification
  source 1..19: mol_type = other RNA
gtttccttagtaaccacag

SEQ ID NO: 605 - RNA, 19 nt, synthetic construct
  misc_feature 1..19: note = Antisense oligonucleotide
  modified_base 1: mod_base = OTHER; note = misc_feature - bicyclic nucleic acid scaffold modification
  modified_base 19: mod_base = OTHER; note = misc_feature - bicyclic nucleic acid scaffold modification
  source 1..19: mol_type = other RNA
gtttccttagtaaccacag

SEQ ID NO: 606 - RNA, 19 nt, synthetic construct
  modified_base 2: mod_base = OTHER; note = thymine
  misc_feature 1..19: note = Antisense oligonucleotide
  modified_base 1..2: mod_base = OTHER; note = misc_feature - bicyclic nucleic acid scaffold modification
  source 1..19: mol_type = other RNA
gtttccttagtaaccacag

SEQ ID NO: 607 - RNA, 19 nt, synthetic construct
  misc_feature 1..19: note = Antisense oligonucleotide
  modified_base 18..19: mod_base = OTHER; note = misc_feature - bicyclic nucleic acid scaffold modification
  source 1..19: mol_type = other RNA
gtttccttagtaaccacag

SEQ ID NO: 608 - RNA, 17 nt, synthetic construct
  misc_feature 1..17: note = Antisense oligonucleotide
  source 1..17: mol_type = other RNA
gtttccttagtaaccac

SEQ ID NO: 609 - RNA, 17 nt, synthetic construct
  misc_feature 1..17: note = Antisense oligonucleotide
  modified_base 1: mod_base = OTHER; note = misc_feature - bicyclic nucleic acid scaffold modification
  source 1..17: mol_type = other RNA
gtttccttagtaaccac

SEQ ID NO: 610 - RNA, 17 nt, synthetic construct
  misc_feature 1..17: note = Antisense oligonucleotide
  modified_base 17: mod_base = OTHER; note = misc_feature - bicyclic nucleic acid scaffold modification
  source 1..17: mol_type = other RNA
gtttccttagtaaccac

SEQ ID NO: 611 - RNA, 17 nt, synthetic construct
  misc_feature 1..17: note = Antisense oligonucleotide
  modified_base 1: mod_base = OTHER; note = misc_feature - bicyclic nucleic acid scaffold modification
  modified_base 17: mod_base = OTHER; note = misc_feature - bicyclic nucleic acid scaffold modification
  source 1..17: mol_type = other RNA
gtttccttagtaaccac

SEQ ID NO: 612 - RNA, 17 nt, synthetic construct
  modified_base 2: mod_base = OTHER; note = thymine
  misc_feature 1..17: note = Antisense oligonucleotide
  modified_base 1..2: mod_base = OTHER; note = misc_feature - bicyclic nucleic acid scaffold modification
  source 1..17: mol_type = other RNA
gtttccttagtaaccac

SEQ ID NO: 613 - RNA, 17 nt, synthetic construct
  misc_feature 1..17: note = Antisense oligonucleotide
  modified_base 16..17: mod_base = OTHER; note = misc_feature - bicyclic nucleic acid scaffold modification
  source 1..17: mol_type = other RNA
gtttccttagtaaccac

SEQ ID NO: 614 - RNA, 25 nt, synthetic construct
  misc_feature 1..25: note = Antisense oligonucleotide
  source 1..25: mol_type = other RNA
ctcttgattgctggtcttgtttttc

SEQ ID NO: 615 - RNA, 25 nt, synthetic construct
  misc_feature 1..25: note = Antisense oligonucleotide
  modified_base 1: mod_base = OTHER; note = misc_feature - bicyclic nucleic acid scaffold modification
  source 1..25: mol_type = other RNA
ctcttgattgctggtcttgtttttc

SEQ ID NO: 616 - RNA, 25 nt, synthetic construct
  misc_feature 1..25: note = Antisense oligonucleotide
  modified_base 25: mod_base = OTHER; note = misc_feature - bicyclic nucleic acid scaffold modification
  source 1..25: mol_type = other RNA
ctcttgattgctggtcttgtttttc

SEQ ID NO: 617 - RNA, 25 nt, synthetic construct
  misc_feature 1..25: note = Antisense oligonucleotide
  modified_base 1: mod_base = OTHER; note = misc_feature - bicyclic nucleic acid scaffold modification
  modified_base 25: mod_base = OTHER; note = misc_feature - bicyclic nucleic acid scaffold modification
  source 1..25: mol_type = other RNA
ctcttgattgctggtcttgtttttc

SEQ ID NO: 618 - RNA, 25 nt, synthetic construct
  modified_base 2: mod_base = OTHER; note = thymine
  misc_feature 1..25: note = Antisense oligonucleotide
  modified_base 1..2: mod_base = OTHER; note = misc_feature - bicyclic nucleic acid scaffold modification
  source 1..25: mol_type = other RNA
ctcttgattgctggtcttgtttttc

SEQ ID NO: 619 - RNA, 25 nt, synthetic construct
  modified_base 24: mod_base = OTHER; note = thymine
  misc_feature 1..25: note = Antisense oligonucleotide
  modified_base 24..25: mod_base = OTHER; note = misc_feature - bicyclic nucleic acid scaffold modification
  source 1..25: mol_type = other RNA
ctcttgattgctggtcttgtttttc

SEQ ID NO: 620 - RNA, 22 nt, synthetic construct
  misc_feature 1..22: note = Antisense oligonucleotide
  source 1..22: mol_type = other RNA
ctcttgattgctggtcttgttt

SEQ ID NO: 621 - RNA, 22 nt, synthetic construct
  misc_feature 1..22: note = Antisense oligonucleotide
  modified_base 1: mod_base = OTHER; note = misc_feature - bicyclic nucleic acid scaffold modification
  source 1..22: mol_type = other RNA
ctcttgattgctggtcttgttt

SEQ ID NO: 622 - RNA, 22 nt, synthetic construct
  modified_base 22: mod_base = OTHER; note = thymine
  misc_feature 1..22: note = Antisense oligonucleotide
  modified_base 22: mod_base = OTHER; note = misc_feature - bicyclic nucleic acid scaffold modification
  source 1..22: mol_type = other RNA
ctcttgattgctggtcttgttt

SEQ ID NO: 623 - RNA, 22 nt, synthetic construct
  modified_base 22: mod_base = OTHER; note = thymine
  misc_feature 1..22: note = Antisense oligonucleotide
  modified_base 1: mod_base = OTHER; note = misc_feature - bicyclic nucleic acid scaffold modification
  modified_base 22: mod_base = OTHER; note = misc_feature - bicyclic nucleic acid scaffold modification
  source 1..22: mol_type = other RNA
ctcttgattgctggtcttgttt

SEQ ID NO: 624 - RNA, 22 nt, synthetic construct
  modified_base 2: mod_base = OTHER; note = thymine
  misc_feature 1..22: note = Antisense oligonucleotide
  modified_base 1..2: mod_base = OTHER; note = misc_feature - bicyclic nucleic acid scaffold modification
  source 1..22: mol_type = other RNA
ctcttgattgctggtcttgttt

SEQ ID NO: 625 - RNA, 22 nt, synthetic construct
  modified_base 21..22: mod_base = OTHER; note = thymine
  misc_feature 1..22: note = Antisense oligonucleotide
  modified_base 21..22: mod_base = OTHER; note = misc_feature - bicyclic nucleic acid scaffold modification
  source 1..22: mol_type = other RNA
ctcttgattgctggtcttgttt

SEQ ID NO: 626 - RNA, 20 nt, synthetic construct
  misc_feature 1..20: note = Antisense oligonucleotide
  source 1..20: mol_type = other RNA
ctcttgattgctggtcttgt

SEQ ID NO: 627 - RNA, 20 nt, synthetic construct
  misc_feature 1..20: note = Antisense oligonucleotide
  modified_base 1: mod_base = OTHER; note = misc_feature - bicyclic nucleic acid scaffold modification
  source 1..20: mol_type = other RNA
ctcttgattgctggtcttgt

SEQ ID NO: 628 - RNA, 20 nt, synthetic construct
  modified_base 20: mod_base = OTHER; note = thymine
  misc_feature 1..20: note = Antisense oligonucleotide
  modified_base 20: mod_base = OTHER; note = misc_feature - bicyclic nucleic acid scaffold modification
  source 1..20: mol_type = other RNA
ctcttgattgctggtcttgt

SEQ ID NO: 629 - RNA, 20 nt, synthetic construct
  modified_base 20: mod_base = OTHER; note = thymine
  misc_feature 1..20: note = Antisense oligonucleotide
  modified_base 1: mod_base = OTHER; note = misc_feature - bicyclic nucleic acid scaffold modification
  modified_base 20: mod_base = OTHER; note = misc_feature - bicyclic nucleic acid scaffold modification
  source 1..20: mol_type = other RNA
ctcttgattgctggtcttgt

SEQ ID NO: 630 - RNA, 20 nt, synthetic construct
  modified_base 2: mod_base = OTHER; note = thymine
  misc_feature 1..20: note = Antisense oligonucleotide
  modified_base 1..2: mod_base = OTHER; note = misc_feature - bicyclic nucleic acid scaffold modification
  source 1..20: mol_type = other RNA
ctcttgattgctggtcttgt

SEQ ID NO: 631 - RNA, 20 nt, synthetic construct
  modified_base 20: mod_base = OTHER; note = thymine
  misc_feature 1..20: note = Antisense oligonucleotide
  modified_base 19..20: mod_base = OTHER; note = misc_feature - bicyclic nucleic acid scaffold modification
  source 1..20: mol_type = other RNA
ctcttgattgctggtcttgt

SEQ ID NO: 632 - RNA, 18 nt, synthetic construct
  misc_feature 1..18: note = Antisense oligonucleotide
  source 1..18: mol_type = other RNA
ctcttgattgctggtctt

SEQ ID NO: 633 - RNA, 18 nt, synthetic construct
  misc_feature 1..18: note = Antisense oligonucleotide
  modified_base 1: mod_base = OTHER; note = misc_feature - bicyclic nucleic acid scaffold modification
  source 1..18: mol_type = other RNA
ctcttgattgctggtctt

SEQ ID NO: 634 - RNA, 18 nt, synthetic construct
  modified_base 18: mod_base = OTHER; note = thymine
  misc_feature 1..18: note = Antisense oligonucleotide
  modified_base 18: mod_base = OTHER; note = misc_feature - bicyclic nucleic acid scaffold modification
  source 1..18: mol_type = other RNA
ctcttgattgctggtctt

SEQ ID NO: 635 - RNA, 18 nt, synthetic construct
  modified_base 18: mod_base = OTHER; note = thymine
  misc_feature 1..18: note = Antisense oligonucleotide
  modified_base 1: mod_base = OTHER; note = misc_feature - bicyclic nucleic acid scaffold modification
  modified_base 18: mod_base = OTHER; note = misc_feature - bicyclic nucleic acid scaffold modification
  source 1..18: mol_type = other RNA
ctcttgattgctggtctt

SEQ ID NO: 636 - RNA, 18 nt, synthetic construct
  modified_base 2: mod_base = OTHER; note = thymine
  misc_feature 1..18: note = Antisense oligonucleotide
  modified_base 1..2: mod_base = OTHER; note = misc_feature - bicyclic nucleic acid scaffold modification
  source 1..18: mol_type = other RNA
ctcttgattgctggtctt

SEQ ID NO: 637 - RNA, 18 nt, synthetic construct
  modified_base 17..18: mod_base = OTHER; note = thymine
  misc_feature 1..18: note = Antisense oligonucleotide
  modified_base 17..18: mod_base = OTHER; note = misc_feature - bicyclic nucleic acid scaffold modification
  source 1..18: mol_type = other RNA
ctcttgattgctggtctt

SEQ ID NO: 638 - RNA, 16 nt, synthetic construct
  misc_feature 1..16: note = Antisense oligonucleotide
  source 1..16: mol_type = other RNA
ctcttgattgctggtc

SEQ ID NO: 639 - RNA, 16 nt, synthetic construct
  misc_feature 1..16: note = Antisense oligonucleotide
  modified_base 1: mod_base = OTHER; note = misc_feature - bicyclic nucleic acid scaffold modification
  source 1..16: mol_type = other RNA
ctcttgattgctggtc

SEQ ID NO: 640 - RNA, 16 nt, synthetic construct
  misc_feature 1..16: note = Antisense oligonucleotide
  modified_base 16: mod_base = OTHER; note = misc_feature - bicyclic nucleic acid scaffold modification
  source 1..16: mol_type = other RNA
ctcttgattgctggtc

SEQ ID NO: 641 - RNA, 16 nt, synthetic construct
  misc_feature 1..16: note = Antisense oligonucleotide
  modified_base 1: mod_base = OTHER; note = misc_feature - bicyclic nucleic acid scaffold modification
  modified_base 16: mod_base = OTHER; note = misc_feature - bicyclic nucleic acid scaffold modification
  source 1..16: mol_type = other RNA
ctcttgattgctggtc

SEQ ID NO: 642 - RNA, 16 nt, synthetic construct
  modified_base 2: mod_base = OTHER; note = thymine
  misc_feature 1..16: note = Antisense oligonucleotide
  modified_base 1..2: mod_base = OTHER; note = misc_feature - bicyclic nucleic acid scaffold modification
  source 1..16: mol_type = other RNA
ctcttgattgctggtc

SEQ ID NO: 643 - RNA, 16 nt, synthetic construct
  modified_base 15: mod_base = OTHER; note = thymine
  misc_feature 1..16: note = Antisense oligonucleotide
  modified_base 15..16: mod_base = OTHER; note = misc_feature - bicyclic nucleic acid scaffold modification
  source 1..16: mol_type = other RNA
ctcttgattgctggtc

SEQ ID NO: 644 - RNA, 22 nt, synthetic construct
  misc_feature 1..22: note = Antisense oligonucleotide
  source 1..22: mol_type = other RNA
ttgattgctggtcttgtttttc

SEQ ID NO: 645 - RNA, 22 nt, synthetic construct
  modified_base 1: mod_base = OTHER; note = thymine
  misc_feature 1..22: note = Antisense oligonucleotide
  modified_base 1: mod_base = OTHER; note = misc_feature - bicyclic nucleic acid scaffold modification
  source 1..22: mol_type = other RNA
ttgattgctggtcttgtttttc

SEQ ID NO: 646 - RNA, 22 nt, synthetic construct
  misc_feature 1..22: note = Antisense oligonucleotide
  modified_base 22: mod_base = OTHER; note = misc_feature - bicyclic nucleic acid scaffold modification
  source 1..22: mol_type = other RNA
ttgattgctggtcttgtttttc

SEQ ID NO: 647 - RNA, 22 nt, synthetic construct
  modified_base 1: mod_base = OTHER; note = thymine
  misc_feature 1..22: note = Antisense oligonucleotide
  modified_base 1: mod_base = OTHER; note = misc_feature - bicyclic nucleic acid scaffold modification
  modified_base 22: mod_base = OTHER; note = misc_feature - bicyclic nucleic acid scaffold modification
  source 1..22: mol_type = other RNA
ttgattgctggtcttgtttttc

SEQ ID NO: 648 - RNA, 22 nt, synthetic construct
  modified_base 1..2: mod_base = OTHER; note = thymine
  misc_feature 1..22: note = Antisense oligonucleotide
  modified_base 1..2: mod_base = OTHER; note = misc_feature - bicyclic nucleic acid scaffold modification
  source 1..22: mol_type = other RNA
ttgattgctggtcttgtttttc

SEQ ID NO: 649 - RNA, 22 nt, synthetic construct
  modified_base 21: mod_base = OTHER; note = thymine
  misc_feature 1..22: note = Antisense oligonucleotide
  modified_base 21..22: mod_base = OTHER; note = misc_feature - bicyclic nucleic acid scaffold modification
  source 1..22: mol_type = other RNA
ttgattgctggtcttgtttttc

SEQ ID NO: 650 - RNA, 20 nt, synthetic construct
  misc_feature 1..20: note = Antisense oligonucleotide
  source 1..20: mol_type = other RNA
gattgctggtcttgtttttc

SEQ ID NO: 651 - RNA, 20 nt, synthetic construct
  misc_feature 1..20: note = Antisense oligonucleotide
  modified_base 1: mod_base = OTHER; note = misc_feature - bicyclic nucleic acid scaffold modification
  source 1..20: mol_type = other RNA
gattgctggtcttgtttttc

SEQ ID NO: 652 - RNA, 20 nt, synthetic construct
  misc_feature 1..20: note = Antisense oligonucleotide
  modified_base 20: mod_base = OTHER; note = misc_feature - bicyclic nucleic acid scaffold modification
  source 1..20: mol_type = other RNA
gattgctggtcttgtttttc

SEQ ID NO: 653 - RNA, 20 nt, synthetic construct
  misc_feature 1..20: note = Antisense oligonucleotide
  modified_base 1: mod_base = OTHER; note = misc_feature - bicyclic nucleic acid scaffold modification
  modified_base 20: mod_base = OTHER; note = misc_feature - bicyclic nucleic acid scaffold modification
  source 1..20: mol_type = other RNA
gattgctggtcttgtttttc

SEQ ID NO: 654 - RNA, 20 nt, synthetic construct
  misc_feature 1..20: note = Antisense oligonucleotide
  modified_base 1..2: mod_base = OTHER; note = misc_feature - bicyclic nucleic acid scaffold modification
  source 1..20: mol_type = other RNA
gattgctggtcttgtttttc

SEQ ID NO: 655 - RNA, 20 nt, synthetic construct
  modified_base 19: mod_base = OTHER; note = thymine
  misc_feature 1..20: note = Antisense oligonucleotide
  modified_base 19..20: mod_base = OTHER; note = misc_feature - bicyclic nucleic acid scaffold modification
  source 1..20: mol_type = other RNA
gattgctggtcttgtttttc

SEQ ID NO: 656 - RNA, 18 nt, synthetic construct
  misc_feature 1..18: note = Antisense oligonucleotide
  source 1..18: mol_type = other RNA
ttgctggtcttgtttttc

SEQ ID NO: 657 - RNA, 18 nt, synthetic construct
  modified_base 1: mod_base = OTHER; note = thymine
  misc_feature 1..18: note = Antisense oligonucleotide
  modified_base 1: mod_base = OTHER; note = misc_feature - bicyclic nucleic acid scaffold modification
  source 1..18: mol_type = other RNA
ttgctggtcttgtttttc

SEQ ID NO: 658 - RNA, 18 nt, synthetic construct
  misc_feature 1..18: note = Antisense oligonucleotide
  modified_base 18: mod_base = OTHER; note = misc_feature - bicyclic nucleic acid scaffold modification
  source 1..18: mol_type = other RNA
ttgctggtcttgtttttc

SEQ ID NO: 659 - RNA, 18 nt, synthetic construct
  modified_base 1: mod_base = OTHER; note = thymine
  misc_feature 1..18: note = Antisense oligonucleotide
  modified_base 1: mod_base = OTHER; note = misc_feature - bicyclic nucleic acid scaffold modification
  modified_base 18: mod_base = OTHER; note = misc_feature - bicyclic nucleic acid scaffold modification
  source 1..18: mol_type = other RNA
ttgctggtcttgtttttc

SEQ ID NO: 660 - RNA, 18 nt, synthetic construct
  modified_base 1..2: mod_base = OTHER; note = thymine
  misc_feature 1..18: note = Antisense oligonucleotide
  modified_base 1..2: mod_base = OTHER; note = misc_feature - bicyclic nucleic acid scaffold modification
  source 1..18: mol_type = other RNA
ttgctggtcttgtttttc

SEQ ID NO: 661 - RNA, 18 nt, synthetic construct
  modified_base 17: mod_base = OTHER; note = thymine
  misc_feature 1..18: note = Antisense oligonucleotide
  modified_base 17..18: mod_base = OTHER; note = misc_feature - bicyclic nucleic acid scaffold modification
  source 1..18: mol_type = other RNA
ttgctggtcttgtttttc

SEQ ID NO: 662 - RNA, 16 nt, synthetic construct
  misc_feature 1..16: note = Antisense oligonucleotide
  source 1..16: mol_type = other RNA
gctggtcttgtttttc

SEQ ID NO: 663 - RNA, 16 nt, synthetic construct
  misc_feature 1..16: note = Antisense oligonucleotide
  modified_base 1: mod_base = OTHER; note = misc_feature - bicyclic nucleic acid scaffold modification
  source 1..16: mol_type = other RNA
gctggtcttgtttttc

SEQ ID NO: 664 - RNA, 16 nt, synthetic construct
  misc_feature 1..16: note = Antisense oligonucleotide
  modified_base 16: mod_base = OTHER; note = misc_feature - bicyclic nucleic acid scaffold modification
  source 1..16: mol_type = other RNA
gctggtcttgtttttc

SEQ ID NO: 665 - RNA, 16 nt, synthetic construct
  misc_feature 1..16: note = Antisense oligonucleotide
  modified_base 1: mod_base = OTHER; note = misc_feature - bicyclic nucleic acid scaffold modification
  modified_base 16: mod_base = OTHER; note = misc_feature - bicyclic nucleic acid scaffold modification
  source 1..16: mol_type = other RNA
gctggtcttgtttttc

SEQ ID NO: 666 - RNA, 16 nt, synthetic construct
  misc_feature 1..16: note = Antisense oligonucleotide
  modified_base 1..2: mod_base = OTHER; note = misc_feature - bicyclic nucleic acid scaffold modification
  source 1..16: mol_type = other RNA
gctggtcttgtttttc

SEQ ID NO: 667 - RNA, 16 nt, synthetic construct
  modified_base 15: mod_base = OTHER; note = thymine
  misc_feature 1..16: note = Antisense oligonucleotide
  modified_base 15..16: mod_base = OTHER; note = misc_feature - bicyclic nucleic acid scaffold modification
  source 1..16: mol_type = other RNA
gctggtcttgtttttc

SEQ ID NO: 668 - RNA, 18 nt, synthetic construct
  misc_feature 1..18: note = Antisense oligonucleotide
  source 1..18: mol_type = other RNA
ttgattgctggtcttgtt

SEQ ID NO: 669 - RNA, 18 nt, synthetic construct
  modified_base 1: mod_base = OTHER; note = thymine
  misc_feature 1..18: note = Antisense oligonucleotide
  modified_base 1: mod_base = OTHER; note = misc_feature - bicyclic nucleic acid scaffold modification
  source 1..18: mol_type = other RNA
ttgattgctggtcttgtt

SEQ ID NO: 670 - RNA, 18 nt, synthetic construct
  modified_base 18: mod_base = OTHER; note = thymine
  misc_feature 1..18: note = Antisense oligonucleotide
  modified_base 18: mod_base = OTHER; note = misc_feature - bicyclic nucleic acid scaffold modification
  source 1..18: mol_type = other RNA
ttgattgctggtcttgtt

SEQ ID NO: 671 - RNA, 18 nt, synthetic construct
  modified_base 1: mod_base = OTHER; note = thymine
  modified_base 18: mod_base = OTHER; note = thymine
  misc_feature 1..18: note = Antisense oligonucleotide
  modified_base 1: mod_base = OTHER; note = misc_feature - bicyclic nucleic acid scaffold modification
  modified_base 18: mod_base = OTHER; note = misc_feature - bicyclic nucleic acid scaffold modification
  source 1..18: mol_type = other RNA
ttgattgctggtcttgtt

SEQ ID NO: 672 - RNA, 18 nt, synthetic construct
  modified_base 1..2: mod_base = OTHER; note = thymine
  misc_feature 1..18: note = Antisense oligonucleotide
  modified_base 1..2: mod_base = OTHER; note = misc_feature - bicyclic nucleic acid scaffold modification
  source 1..18: mol_type = other RNA
ttgattgctggtcttgtt

SEQ ID NO: 673 - RNA, 18 nt, synthetic construct
  modified_base 17..18: mod_base = OTHER; note = thymine
  misc_feature 1..18: note = Antisense oligonucleotide
  modified_base 17..18: mod_base = OTHER; note = misc_feature - bicyclic nucleic acid scaffold modification
  source 1..18: mol_type = other RNA
ttgattgctggtcttgtt

SEQ ID NO: 674 - RNA, 22 nt, synthetic construct
  misc_feature 1..22: note = Antisense oligonucleotide
  source 1..22: mol_type = other RNA
ggtaatgagttcttccaactgg

SEQ ID NO: 675 - RNA, 22 nt, synthetic construct
  misc_feature 1..22: note = Antisense oligonucleotide
  modified_base 1: mod_base = OTHER; note = misc_feature - bicyclic nucleic acid scaffold modification
  source 1..22: mol_type = other RNA
ggtaatgagttcttccaactgg

SEQ ID NO: 676 - RNA, 22 nt, synthetic construct
  misc_feature 1..22: note = Antisense oligonucleotide
  modified_base 22: mod_base = OTHER; note = misc_feature - bicyclic nucleic acid scaffold modification
  source 1..22: mol_type = other RNA
ggtaatgagttcttccaactgg

SEQ ID NO: 677 - RNA, 22 nt, synthetic construct
  misc_feature 1..22: note = Antisense oligonucleotide
  modified_base 1: mod_base = OTHER; note = misc_feature - bicyclic nucleic acid scaffold modification
  modified_base 22: mod_base = OTHER; note = misc_feature - bicyclic nucleic acid scaffold modification
  source 1..22: mol_type = other RNA
ggtaatgagttcttccaactgg

SEQ ID NO: 678 - RNA, 22 nt, synthetic construct
  misc_feature 1..22: note = Antisense oligonucleotide
  modified_base 1..2: mod_base = OTHER; note = misc_feature - bicyclic nucleic acid scaffold modification
  source 1..22: mol_type = other RNA
ggtaatgagttcttccaactgg

SEQ ID NO: 679 - RNA, 22 nt, synthetic construct
  misc_feature 1..22: note = Antisense oligonucleotide
  modified_base 21..22: mod_base = OTHER; note = misc_feature - bicyclic nucleic acid scaffold modification
  source 1..22: mol_type = other RNA
ggtaatgagttcttccaactgg

SEQ ID NO: 680 - RNA, 20 nt, synthetic construct
  misc_feature 1..20: note = Antisense oligonucleotide
  source 1..20: mol_type = other RNA
ggtaatgagttcttccaact

SEQ ID NO: 681 - RNA, 20 nt, synthetic construct
  misc_feature 1..20: note = Antisense oligonucleotide
  modified_base 1: mod_base = OTHER; note = misc_feature - bicyclic nucleic acid scaffold modification
  source 1..20: mol_type = other RNA
ggtaatgagttcttccaact

SEQ ID NO: 682 - RNA, 20 nt, synthetic construct
  modified_base 20: mod_base = OTHER; note = thymine
  misc_feature 1..20: note = Antisense oligonucleotide
  modified_base 20: mod_base = OTHER; note = misc_feature - bicyclic nucleic acid scaffold modification
  source 1..20: mol_type = other RNA
ggtaatgagttcttccaact

SEQ ID NO: 683 - RNA, 20 nt, synthetic construct
  modified_base 20: mod_base = OTHER; note = thymine
  misc_feature 1..20: note = Antisense oligonucleotide
  modified_base 1: mod_base = OTHER; note = misc_feature - bicyclic nucleic acid scaffold modification
  modified_base 20: mod_base = OTHER; note = misc_feature - bicyclic nucleic acid scaffold modification
  source 1..20: mol_type = other RNA
ggtaatgagttcttccaact

SEQ ID NO: 684 - RNA, 20 nt, synthetic construct
  misc_feature 1..20: note = Antisense oligonucleotide
  modified_base 1..2: mod_base = OTHER; note = misc_feature - bicyclic nucleic acid scaffold modification
  source 1..20: mol_type = other RNA
ggtaatgagttcttccaact

SEQ ID NO: 685 - RNA, 20 nt, synthetic construct
  modified_base 20: mod_base = OTHER; note = thymine
  misc_feature 1..20: note = Antisense oligonucleotide
  modified_base 19..20: mod_base = OTHER; note = misc_feature - bicyclic nucleic acid scaffold modification
  source 1..20: mol_type = other RNA
ggtaatgagttcttccaact

SEQ ID NO: 686 - RNA, 18 nt, synthetic construct
  misc_feature 1..18: note = Antisense oligonucleotide
  source 1..18: mol_type = other RNA
ggtaatgagttcttccaa

SEQ ID NO: 687 - RNA, 18 nt, synthetic construct
  misc_feature 1..18: note = Antisense oligonucleotide
  modified_base 1: mod_base = OTHER; note = misc_feature - bicyclic nucleic acid scaffold modification
  source 1..18: mol_type = other RNA
ggtaatgagttcttccaa

SEQ ID NO: 688 - RNA, 18 nt, synthetic construct
  misc_feature 1..18: note = Antisense oligonucleotide
  modified_base 18: mod_base = OTHER; note = misc_feature - bicyclic nucleic acid scaffold modification
  source 1..18: mol_type = other RNA
ggtaatgagttcttccaa

SEQ ID NO: 689 - RNA, 18 nt, synthetic construct
  misc_feature 1..18: note = Antisense oligonucleotide
  modified_base 1: mod_base = OTHER; note = misc_feature - bicyclic nucleic acid scaffold modification
  modified_base 18: mod_base = OTHER; note = misc_feature - bicyclic nucleic acid scaffold modification
  source 1..18: mol_type = other RNA
ggtaatgagttcttccaa

SEQ ID NO: 690 - RNA, 18 nt, synthetic construct
  misc_feature 1..18: note = Antisense oligonucleotide
  modified_base 1..2: mod_base = OTHER; note = misc_feature - bicyclic nucleic acid scaffold modification
  source 1..18: mol_type = other RNA
ggtaatgagttcttccaa

SEQ ID NO: 691 - RNA, 18 nt, synthetic construct
  misc_feature 1..18: note = Antisense oligonucleotide
  modified_base 17..18: mod_base = OTHER; note = misc_feature - bicyclic nucleic acid scaffold modification
  source 1..18: mol_type = other RNA
ggtaatgagttcttccaa

SEQ ID NO: 692 - RNA, 16 nt, synthetic construct
  misc_feature 1..16: note = Antisense oligonucleotide
  source 1..16: mol_type = other RNA
ggtaatgagttcttcc

SEQ ID NO: 693 - RNA, 16 nt, synthetic construct
  misc_feature 1..16: note = Antisense oligonucleotide
  modified_base 1: mod_base = OTHER; note = misc_feature - bicyclic nucleic acid scaffold modification
  source 1..16: mol_type = other RNA
ggtaatgagttcttcc

SEQ ID NO: 694 - RNA, 16 nt, synthetic construct
  misc_feature 1..16: note = Antisense oligonucleotide
  modified_base 16: mod_base = OTHER; note = misc_feature - bicyclic nucleic acid scaffold modification
  source 1..16: mol_type = other RNA
ggtaatgagttcttcc

SEQ ID NO: 695 - RNA, 16 nt, synthetic construct
  misc_feature 1..16: note = Antisense oligonucleotide
  modified_base 1: mod_base = OTHER; note = misc_feature - bicyclic nucleic acid scaffold modification
  modified_base 16: mod_base = OTHER; note = misc_feature - bicyclic nucleic acid scaffold modification
  source 1..16: mol_type = other RNA
ggtaatgagttcttcc

SEQ ID NO: 696 - RNA, 16 nt, synthetic construct
  misc_feature 1..16: note = Antisense oligonucleotide
  modified_base 1..2: mod_base = OTHER; note = misc_feature - bicyclic nucleic acid scaffold modification
  source 1..16: mol_type = other RNA
ggtaatgagttcttcc

SEQ ID NO: 697 - RNA, 16 nt, synthetic construct
  misc_feature 1..16: note = Antisense oligonucleotide
  modified_base 15..16: mod_base = OTHER; note = misc_feature - bicyclic nucleic acid scaffold modification
  source 1..16: mol_type = other RNA
ggtaatgagttcttcc

SEQ ID NO: 698 - RNA, 20 nt, synthetic construct
  misc_feature 1..20: note = Antisense oligonucleotide
  source 1..20: mol_type = other RNA
taatgagttcttccaactgg

SEQ ID NO: 699 - RNA, 20 nt, synthetic construct
  modified_base 1: mod_base = OTHER; note = thymine
  misc_feature 1..20: note = Antisense oligonucleotide
  modified_base 1: mod_base = OTHER; note = misc_feature - bicyclic nucleic acid scaffold modification
  source 1..20: mol_type = other RNA
taatgagttcttccaactgg

SEQ ID NO: 700 - RNA, 20 nt, synthetic construct
  misc_feature 1..20: note = Antisense oligonucleotide
  modified_base 20: mod_base = OTHER; note = misc_feature - bicyclic nucleic acid scaffold modification
  source 1..20: mol_type = other RNA
taatgagttcttccaactgg

SEQ ID NO: 701 - RNA, 20 nt, synthetic construct
  modified_base 1: mod_base = OTHER; note = thymine
  misc_feature 1..20: note = Antisense oligonucleotide
  modified_base 1: mod_base = OTHER; note = misc_feature - bicyclic nucleic acid scaffold modification
  modified_base 20: mod_base = OTHER; note = misc_feature - bicyclic nucleic acid scaffold modification
  source 1..20: mol_type = other RNA
taatgagttcttccaactgg

SEQ ID NO: 702 - RNA, 20 nt, synthetic construct
  modified_base 1: mod_base = OTHER; note = thymine
  misc_feature 1..20: note = Antisense oligonucleotide
  modified_base 1..2: mod_base = OTHER; note = misc_feature - bicyclic nucleic acid scaffold modification
  source 1..20: mol_type = other RNA
taatgagttcttccaactgg

SEQ ID NO: 703 - RNA, 20 nt, synthetic construct
  misc_feature 1..20: note = Antisense oligonucleotide
  modified_base 19..20: mod_base = OTHER; note = misc_feature - bicyclic nucleic acid scaffold modification
  source 1..20: mol_type = other RNA
taatgagttcttccaactgg

SEQ ID NO: 704 - RNA, 18 nt, synthetic construct
  misc_feature 1..18: note = Antisense oligonucleotide
  source 1..18: mol_type = other RNA
atgagttcttccaactgg

SEQ ID NO: 705 - RNA, 18 nt, synthetic construct
  misc_feature 1..18: note = Antisense oligonucleotide
  modified_base 1: mod_base = OTHER; note = misc_feature - bicyclic nucleic acid scaffold modification
  source 1..18: mol_type = other RNA
atgagttcttccaactgg

SEQ ID NO: 706 - RNA, 18 nt, synthetic construct
  misc_feature 1..18: note = Antisense oligonucleotide
  modified_base 18: mod_base = OTHER; note = misc_feature - bicyclic nucleic acid scaffold modification
  source 1..18: mol_type = other RNA
atgagttcttccaactgg

SEQ ID NO: 707 - RNA, 18 nt, synthetic construct
  misc_feature 1..18: note = Antisense oligonucleotide
  modified_base 1: mod_base = OTHER; note = misc_feature - bicyclic nucleic acid scaffold modification
  modified_base 18: mod_base = OTHER; note = misc_feature - bicyclic nucleic acid scaffold modification
  source 1..18: mol_type = other RNA
atgagttcttccaactgg

SEQ ID NO: 708 - RNA, 18 nt, synthetic construct
  modified_base 2: mod_base = OTHER; note = thymine
  misc_feature 1..18: note = Antisense oligonucleotide
  modified_base 1..2: mod_base = OTHER; note = misc_feature - bicyclic nucleic acid scaffold modification
  source 1..18: mol_type = other RNA
atgagttcttccaactgg

SEQ ID NO: 709 - RNA, 18 nt, synthetic construct
  misc_feature 1..18: note = Antisense oligonucleotide
  modified_base 17..18: mod_base = OTHER; note = misc_feature - bicyclic nucleic acid scaffold modification
  source 1..18: mol_type = other RNA
atgagttcttccaactgg

SEQ ID NO: 710 - RNA, 16 nt, synthetic construct
  misc_feature 1..16: note = Antisense oligonucleotide
  source 1..16: mol_type = other RNA
gagttcttccaactgg

SEQ ID NO: 711 - RNA, 16 nt, synthetic construct
  misc_feature 1..16: note = Antisense oligonucleotide
  modified_base 1: mod_base = OTHER; note = misc_feature - bicyclic nucleic acid scaffold modification
  source 1..16: mol_type = other RNA
gagttcttccaactgg

SEQ ID NO: 712 - RNA, 16 nt, synthetic construct
  misc_feature 1..16: note = Antisense oligonucleotide
  modified_base 16: mod_base = OTHER; note = misc_feature - bicyclic nucleic acid scaffold modification
  source 1..16: mol_type = other RNA
gagttcttccaactgg

SEQ ID NO: 713 - RNA, 16 nt, synthetic construct
  misc_feature 1..16: note = Antisense oligonucleotide
  modified_base 1: mod_base = OTHER; note = misc_feature - bicyclic nucleic acid scaffold modification
  modified_base 16: mod_base = OTHER; note = misc_feature - bicyclic nucleic acid scaffold modification
  source 1..16: mol_type = other RNA
gagttcttccaactgg

SEQ ID NO: 714 - RNA, 16 nt, synthetic construct
  misc_feature 1..16: note = Antisense oligonucleotide
  modified_base 1..2: mod_base = OTHER; note = misc_feature - bicyclic nucleic acid scaffold modification
  source 1..16: mol_type = other RNA
gagttcttccaactgg

SEQ ID NO: 715 - RNA, 16 nt, synthetic construct
  misc_feature 1..16: note = Antisense oligonucleotide
  modified_base 15..16: mod_base = OTHER; note = misc_feature - bicyclic nucleic acid scaffold modification
  source 1..16: mol_type = other RNA
gagttcttccaactgg

SEQ ID NO: 716 - RNA, 18 nt, synthetic construct
  misc_feature 1..18: note = Antisense oligonucleotide
  source 1..18: mol_type = other RNA
taatgagttcttccaact

SEQ ID NO: 717 - RNA, 18 nt, synthetic construct
  modified_base 1: mod_base = OTHER; note = thymine
  misc_feature 1..18: note = Antisense oligonucleotide
  modified_base 1: mod_base = OTHER; note = misc_feature - bicyclic nucleic acid scaffold modification
  source 1..18: mol_type = other RNA
taatgagttcttccaact

SEQ ID NO: 718 - RNA, 18 nt, synthetic construct
  modified_base 18: mod_base = OTHER; note = thymine
  misc_feature 1..18: note = Antisense oligonucleotide
  modified_base 18: mod_base = OTHER; note = misc_feature - bicyclic nucleic acid scaffold modification
  source 1..18: mol_type = other RNA
taatgagttcttccaact

SEQ ID NO: 719 - RNA, 18 nt, synthetic construct
  modified_base 1: mod_base = OTHER; note = thymine
  modified_base 18: mod_base = OTHER; note = thymine
  misc_feature 1..18: note = Antisense oligonucleotide
  modified_base 1: mod_base = OTHER; note = misc_feature - bicyclic nucleic acid scaffold modification
  modified_base 18: mod_base = OTHER; note = misc_feature - bicyclic nucleic acid scaffold modification
  source 1..18: mol_type = other RNA
taatgagttcttccaact

SEQ ID NO: 720 - RNA, 18 nt, synthetic construct
  modified_base 1: mod_base = OTHER; note = thymine
  misc_feature 1..18: note = Antisense oligonucleotide
  modified_base 1..2: mod_base = OTHER; note = misc_feature - bicyclic nucleic acid scaffold modification
  source 1..18: mol_type = other RNA
taatgagttcttccaact

SEQ ID NO: 721 - RNA, 18 nt, synthetic construct
  modified_base 18: mod_base = OTHER; note = thymine
  misc_feature 1..18: note = Antisense oligonucleotide
  modified_base 17..18: mod_base = OTHER; note = misc_feature - bicyclic nucleic acid scaffold modification
  source 1..18: mol_type = other RNA
taatgagttcttccaact

SEQ ID NO: 722 - RNA, 25 nt, synthetic construct
  misc_feature 1..25: note = Antisense oligonucleotide
  source 1..25: mol_type = other RNA
tcttgattgctggtcttgtttttca

SEQ ID NO: 723 - RNA, 25 nt, synthetic construct
  modified_base 1: mod_base = OTHER; note = thymine
  misc_feature 1..25: note = Antisense oligonucleotide
  modified_base 1: mod_base = OTHER; note = misc_feature - bicyclic nucleic acid scaffold modification
  source 1..25: mol_type = other RNA
tcttgattgctggtcttgtttttca

SEQ ID NO: 724 - RNA, 25 nt, synthetic construct
  misc_feature 1..25: note = Antisense oligonucleotide
  modified_base 25: mod_base = OTHER; note = misc_feature - bicyclic nucleic acid scaffold modification
  source 1..25: mol_type = other RNA
tcttgattgctggtcttgtttttca

SEQ ID NO: 725 - RNA, 25 nt, synthetic construct
  modified_base 1: mod_base = OTHER; note = thymine
  misc_feature 1..25: note = Antisense oligonucleotide
  modified_base 1: mod_base = OTHER; note = misc_feature - bicyclic nucleic acid scaffold modification
  modified_base 25: mod_base = OTHER; note = misc_feature - bicyclic nucleic acid scaffold modification
  source 1..25: mol_type = other RNA
tcttgattgctggtcttgtttttca

SEQ ID NO: 726 - RNA, 25 nt, synthetic construct
  modified_base 1: mod_base = OTHER; note = thymine
  misc_feature 1..25: note = Antisense oligonucleotide
  modified_base 1..2: mod_base = OTHER; note = misc_feature - bicyclic nucleic acid scaffold modification
  source 1..25: mol_type = other RNA
tcttgattgctggtcttgtttttca

SEQ ID NO: 727 - RNA, 25 nt, synthetic construct
  misc_feature 1..25: note = Antisense oligonucleotide
  modified_base 24..25: mod_base = OTHER; note = misc_feature - bicyclic nucleic acid scaffold modification
  source 1..25: mol_type = other RNA
tcttgattgctggtcttgtttttca

SEQ ID NO: 728 - RNA, 22 nt, synthetic construct
  misc_feature 1..22: note = Antisense oligonucleotide
  source 1..22: mol_type = other RNA
tcttgattgctggtcttgtttt

SEQ ID NO: 729 - RNA, 22 nt, synthetic construct
  modified_base 1: mod_base = OTHER; note = thymine
  misc_feature 1..22: note = Antisense oligonucleotide
  modified_base 1: mod_base = OTHER; note = misc_feature - bicyclic nucleic acid scaffold modification
  source 1..22: mol_type = other RNA
tcttgattgctggtcttgtttt

SEQ ID NO: 730 - RNA, 22 nt, synthetic construct
  modified_base 22: mod_base = OTHER; note = thymine
  misc_feature 1..22: note = Antisense oligonucleotide
  modified_base 22: mod_base = OTHER; note = misc_feature - bicyclic nucleic acid scaffold modification
  source 1..22: mol_type = other RNA
tcttgattgctggtcttgtttt

SEQ ID NO: 731 - RNA, 22 nt, synthetic construct
  modified_base 1: mod_base = OTHER; note = thymine
  modified_base 22: mod_base = OTHER; note = thymine
  misc_feature 1..22: note = Antisense oligonucleotide
  modified_base 1: mod_base = OTHER; note = misc_feature - bicyclic nucleic acid scaffold modification
  modified_base 22: mod_base = OTHER; note = misc_feature - bicyclic nucleic acid scaffold modification
  source 1..22: mol_type = other RNA
tcttgattgctggtcttgtttt

SEQ ID NO: 732 - RNA, 22 nt, synthetic construct
  modified_base 1: mod_base = OTHER; note = thymine
  misc_feature 1..22: note = Antisense oligonucleotide
  modified_base 1..2: mod_base = OTHER; note = misc_feature - bicyclic nucleic acid scaffold modification
  source 1..22: mol_type = other RNA
tcttgattgctggtcttgtttt

SEQ ID NO: 733 - RNA, 22 nt, synthetic construct
  modified_base 21..22: mod_base = OTHER; note = thymine
  misc_feature 1..22: note = Antisense oligonucleotide
  modified_base 21..22: mod_base = OTHER; note = misc_feature - bicyclic nucleic acid scaffold modification
  source 1..22: mol_type = other RNA
tcttgattgctggtcttgtttt

SEQ ID NO: 734 - RNA, 20 nt, synthetic construct
  misc_feature 1..20: note = Antisense oligonucleotide
  source 1..20: mol_type = other RNA
tcttgattgctggtcttgtt

SEQ ID NO: 735 - RNA, 20 nt, synthetic construct
  modified_base 1: mod_base = OTHER; note = thymine
  misc_feature 1..20: note = Antisense oligonucleotide
  modified_base 1: mod_base = OTHER; note = misc_feature - bicyclic nucleic acid scaffold modification
  source 1..20: mol_type = other RNA
tcttgattgctggtcttgtt

SEQ ID NO: 736 - RNA, 20 nt, synthetic construct
  modified_base 20: mod_base = OTHER; note = thymine
  misc_feature 1..20: note = Antisense oligonucleotide
  modified_base 20: mod_base = OTHER; note = misc_feature - bicyclic nucleic acid scaffold modification
  source 1..20: mol_type = other RNA
tcttgattgctggtcttgtt

SEQ ID NO: 737 - RNA, 20 nt, synthetic construct
  modified_base 1: mod_base = OTHER; note = thymine
  modified_base 20: mod_base = OTHER; note = thymine
  misc_feature 1..20: note = Antisense oligonucleotide
  modified_base 1: mod_base = OTHER; note = misc_feature - bicyclic nucleic acid scaffold modification
  modified_base 20: mod_base = OTHER; note = misc_feature - bicyclic nucleic acid scaffold modification
  source 1..20: mol_type = other RNA
tcttgattgctggtcttgtt

SEQ ID NO: 738 - RNA, 20 nt, synthetic construct
  modified_base 1: mod_base = OTHER; note = thymine
  misc_feature 1..20: note = Antisense oligonucleotide
  modified_base 1..2: mod_base = OTHER; note = misc_feature - bicyclic nucleic acid scaffold modification
  source 1..20: mol_type = other RNA
tcttgattgctggtcttgtt

SEQ ID NO: 739 - RNA, 20 nt, synthetic construct
  modified_base 19..20: mod_base = OTHER; note = thymine
  misc_feature 1..20: note = Antisense oligonucleotide
  modified_base 19..20: mod_base = OTHER; note = misc_feature - bicyclic nucleic acid scaffold modification
  source 1..20: mol_type = other RNA
tcttgattgctggtcttgtt

SEQ ID NO: 740 - RNA, 18 nt, synthetic construct
  misc_feature 1..18: note = Antisense oligonucleotide
  source 1..18: mol_type = other RNA
tcttgattgctggtcttg

SEQ ID NO: 741 - RNA, 18 nt, synthetic construct
  modified_base 1: mod_base = OTHER; note = thymine
  misc_feature 1..18: note = Antisense oligonucleotide
  modified_base 1: mod_base = OTHER; note = misc_feature - bicyclic nucleic acid scaffold modification
  source 1..18: mol_type = other RNA
tcttgattgctggtcttg

SEQ ID NO: 742 - RNA, 18 nt, synthetic construct
  misc_feature 1..18: note = Antisense oligonucleotide
  modified_base 18: mod_base = OTHER; note = misc_feature - bicyclic nucleic acid scaffold modification
  source 1..18: mol_type = other RNA
tcttgattgctggtcttg

SEQ ID NO: 743 - RNA, 18 nt, synthetic construct
  modified_base 1: mod_base = OTHER; note = thymine
  misc_feature 1..18: note = Antisense oligonucleotide
  modified_base 1: mod_base = OTHER; note = misc_feature - bicyclic nucleic acid scaffold modification
  modified_base 18: mod_base = OTHER; note = misc_feature - bicyclic nucleic acid scaffold modification
  source 1..18: mol_type = other RNA
tcttgattgctggtcttg

SEQ ID NO: 744 - RNA, 18 nt, synthetic construct
  modified_base 1: mod_base = OTHER; note = thymine
  misc_feature 1..18: note = Antisense oligonucleotide
  modified_base 1..2: mod_base = OTHER; note = misc_feature - bicyclic nucleic acid scaffold modification
  source 1..18: mol_type = other RNA
tcttgattgctggtcttg

SEQ ID NO: 745 - RNA, 18 nt, synthetic construct
  modified_base 17: mod_base = OTHER; note = thymine
  misc_feature 1..18: note = Antisense oligonucleotide
  modified_base 17..18: mod_base = OTHER; note = misc_feature - bicyclic nucleic acid scaffold modification
  source 1..18: mol_type = other RNA
tcttgattgctggtcttg

SEQ ID NO: 746 - RNA, 16 nt, synthetic construct
  misc_feature 1..16: note = Antisense oligonucleotide
  source 1..16: mol_type = other RNA
tcttgattgctggtct

SEQ ID NO: 747 - RNA, 16 nt, synthetic construct
  modified_base 1: mod_base = OTHER; note = thymine
  misc_feature 1..16: note = Antisense oligonucleotide
  modified_base 1: mod_base = OTHER; note = misc_feature - bicyclic nucleic acid scaffold modification
  source 1..16: mol_type = other RNA
tcttgattgctggtct

SEQ ID NO: 748 - RNA, 16 nt, synthetic construct
  modified_base 16: mod_base = OTHER; note = thymine
  misc_feature 1..16: note = Antisense oligonucleotide
  modified_base 16: mod_base = OTHER; note = misc_feature - bicyclic nucleic acid scaffold modification
  source 1..16: mol_type = other RNA
tcttgattgctggtct

SEQ ID NO: 749 - RNA, 16 nt, synthetic construct
  modified_base 1: mod_base = OTHER; note = thymine
  modified_base 16: mod_base = OTHER; note = thymine
  misc_feature 1..16: note = Antisense oligonucleotide
  modified_base 1: mod_base = OTHER; note = misc_feature - bicyclic nucleic acid scaffold modification
  modified_base 16: mod_base = OTHER; note = misc_feature - bicyclic nucleic acid scaffold modification
  source 1..16: mol_type = other RNA
tcttgattgctggtct

SEQ ID NO: 750 - RNA, 16 nt, synthetic construct
  modified_base 1: mod_base = OTHER; note = thymine
  misc_feature 1..16: note = Antisense oligonucleotide
  modified_base 1..2: mod_base = OTHER; note = misc_feature - bicyclic nucleic acid scaffold modification
  source 1..16: mol_type = other RNA
tcttgattgctggtct

SEQ ID NO: 751 - RNA, 16 nt, synthetic construct
  modified_base 16: mod_base = OTHER; note = thymine
  misc_feature 1..16: note = Antisense oligonucleotide
  modified_base 15..16: mod_base = OTHER; note = misc_feature - bicyclic nucleic acid scaffold modification
  source 1..16: mol_type = other RNA
tcttgattgctggtct

SEQ ID NO: 752 - RNA, 22 nt, synthetic construct
  misc_feature 1..22: note = Antisense oligonucleotide
  source 1..22: mol_type = other RNA
tgattgctggtcttgtttttca

SEQ ID NO: 753 - RNA, 22 nt, synthetic construct
  modified_base 1: mod_base = OTHER; note = thymine
  misc_feature 1..22: note = Antisense oligonucleotide
  modified_base 1: mod_base = OTHER; note = misc_feature - bicyclic nucleic acid scaffold modification
  source 1..22: mol_type = other RNA
tgattgctggtcttgtttttca

SEQ ID NO: 754 - RNA, 22 nt, synthetic construct
  misc_feature 1..22: note = Antisense oligonucleotide
  modified_base 22: mod_base = OTHER; note = misc_feature - bicyclic nucleic acid scaffold modification
  source 1..22: mol_type = other RNA
tgattgctggtcttgtttttca

SEQ ID NO: 755 - RNA, 22 nt, synthetic construct
  modified_base 1: mod_base = OTHER; note = thymine
  misc_feature 1..22: note = Antisense oligonucleotide
  modified_base 1: mod_base = OTHER; note = misc_feature - bicyclic nucleic acid scaffold modification
  modified_base 22: mod_base = OTHER; note = misc_feature - bicyclic nucleic acid scaffold modification
  source 1..22: mol_type = other RNA
tgattgctggtcttgtttttca

SEQ ID NO: 756 - RNA, 22 nt, synthetic construct
  modified_base 1: mod_base = OTHER; note = thymine
  misc_feature 1..22: note = Antisense oligonucleotide
  modified_base 1..2: mod_base = OTHER; note = misc_feature - bicyclic nucleic acid scaffold modification
  source 1..22: mol_type = other RNA
tgattgctggtcttgtttttca

SEQ ID NO: 757 - RNA, 22 nt, synthetic construct
  misc_feature 1..22: note = Antisense oligonucleotide
  modified_base 21..22: mod_base = OTHER; note = misc_feature - bicyclic nucleic acid scaffold modification
  source 1..22: mol_type = other RNA
tgattgctggtcttgtttttca

SEQ ID NO: 758 - RNA, 20 nt, synthetic construct
  misc_feature 1..20: note = Antisense oligonucleotide
  source 1..20: mol_type = other RNA
attgctggtcttgtttttca

SEQ ID NO: 759 - RNA, 20 nt, synthetic construct
  misc_feature 1..20: note = Antisense oligonucleotide
  modified_base 1: mod_base = OTHER; note = misc_feature - bicyclic nucleic acid scaffold modification
  source 1..20: mol_type = other RNA
attgctggtcttgtttttca

SEQ ID NO: 760 - RNA, 20 nt, synthetic construct
  misc_feature 1..20: note = Antisense oligonucleotide
  modified_base 20: mod_base = OTHER; note = misc_feature - bicyclic nucleic acid scaffold modification
  source 1..20: mol_type = other RNA
attgctggtcttgtttttca

SEQ ID NO: 761 - RNA, 20 nt, synthetic construct
  misc_feature 1..20: note = Antisense oligonucleotide
  modified_base 1: mod_base = OTHER; note = misc_feature - bicyclic nucleic acid scaffold modification
  modified_base 20: mod_base = OTHER; note = misc_feature - bicyclic nucleic acid scaffold modification
  source 1..20: mol_type = other RNA
attgctggtcttgtttttca

SEQ ID NO: 762 - RNA, 20 nt, synthetic construct
  modified_base 2: mod_base = OTHER; note = thymine
  misc_feature 1..20: note = Antisense oligonucleotide
  modified_base 1..2: mod_base = OTHER; note = misc_feature - bicyclic nucleic acid scaffold modification
  source 1..20: mol_type = other RNA
attgctggtcttgtttttca

SEQ ID NO: 763 - RNA, 20 nt, synthetic construct
  misc_feature 1..20: note = Antisense oligonucleotide
  modified_base 19..20: mod_base = OTHER; note = misc_feature - bicyclic nucleic acid scaffold modification
  source 1..20: mol_type = other RNA
attgctggtcttgtttttca

SEQ ID NO: 764 - RNA, 18 nt, synthetic construct
  misc_feature 1..18: note = Antisense oligonucleotide
  source 1..18: mol_type = other RNA
tgctggtcttgtttttca

SEQ ID NO: 765 - RNA, 18 nt, synthetic construct
  modified_base 1: mod_base = OTHER; note = thymine
  misc_feature 1..18: note = Antisense oligonucleotide
  modified_base 1: mod_base = OTHER; note = misc_feature - bicyclic nucleic acid scaffold modification
  source 1..18: mol_type = other RNA
tgctggtcttgtttttca

SEQ ID NO: 766 - RNA, 18 nt, synthetic construct
  misc_feature 1..18: note = Antisense oligonucleotide
  modified_base 18: mod_base = OTHER; note = misc_feature - bicyclic nucleic acid scaffold modification
  source 1..18: mol_type = other RNA
tgctggtcttgtttttca

SEQ ID NO: 767 - RNA, 18 nt, synthetic construct
  modified_base 1: mod_base = OTHER; note = thymine
  misc_feature 1..18: note = Antisense oligonucleotide
  modified_base 1: mod_base = OTHER; note = misc_feature - bicyclic nucleic acid scaffold modification
  modified_base 18: mod_base = OTHER; note = misc_feature - bicyclic nucleic acid scaffold modification
  source 1..18: mol_type = other RNA
tgctggtcttgtttttca

SEQ ID NO: 768 - RNA, 18 nt, synthetic construct
  modified_base 1: mod_base = OTHER; note = thymine
  misc_feature 1..18: note = Antisense oligonucleotide
  modified_base 1..2: mod_base = OTHER; note = misc_feature - bicyclic nucleic acid scaffold modification
  source 1..18: mol_type = other RNA
tgctggtcttgtttttca

SEQ ID NO: 769 - RNA, 18 nt, synthetic construct
  misc_feature 1..18: note = Antisense oligonucleotide
  modified_base 17..18: mod_base = OTHER; note = misc_feature - bicyclic nucleic acid scaffold modification
  source 1..18: mol_type = other RNA
tgctggtcttgtttttca

SEQ ID NO: 770 - RNA, 16 nt, synthetic construct
  misc_feature 1..16: note = Antisense oligonucleotide
  source 1..16: mol_type = other RNA
ctggtcttgtttttca

SEQ ID NO: 771 - RNA, 16 nt, synthetic construct
  misc_feature 1..16: note = Antisense oligonucleotide
  modified_base 1: mod_base = OTHER; note = misc_feature - bicyclic nucleic acid scaffold modification
  source 1..16: mol_type = other RNA
ctggtcttgtttttca

SEQ ID NO: 772 - RNA, 16 nt, synthetic construct
  misc_feature 1..16: note = Antisense oligonucleotide
  modified_base 16: mod_base = OTHER; note = misc_feature - bicyclic nucleic acid scaffold modification
  source 1..16: mol_type = other RNA
ctggtcttgtttttca

SEQ ID NO: 773 - RNA, 16 nt, synthetic construct
  misc_feature 1..16: note = Antisense oligonucleotide
  modified_base 1: mod_base = OTHER; note = misc_feature - bicyclic nucleic acid scaffold modification
  modified_base 16: mod_base = OTHER; note = misc_feature - bicyclic nucleic acid scaffold modification
  source 1..16: mol_type = other RNA
ctggtcttgtttttca

SEQ ID NO: 774 - RNA, 16 nt, synthetic construct
  modified_base 2: mod_base = OTHER; note = thymine
  misc_feature 1..16: note = Antisense oligonucleotide
  modified_base 1..2: mod_base = OTHER; note = misc_feature - bicyclic nucleic acid scaffold modification
  source 1..16: mol_type = other RNA
ctggtcttgtttttca

SEQ ID NO: 775 - RNA, 16 nt, synthetic construct
  misc_feature 1..16: note = Antisense oligonucleotide
  modified_base 15..16: mod_base = OTHER; note = misc_feature - bicyclic nucleic acid scaffold modification
  source 1..16: mol_type = other RNA
ctggtcttgtttttca

SEQ ID NO: 776 - RNA, 18 nt, synthetic construct
  misc_feature 1..18: note = Antisense oligonucleotide
  source 1..18: mol_type = other RNA
tgattgctggtcttgttt

SEQ ID NO: 777 - RNA, 18 nt, synthetic construct
  modified_base 1: mod_base = OTHER; note = thymine
  misc_feature 1..18: note = Antisense oligonucleotide
  modified_base 1: mod_base = OTHER; note = misc_feature - bicyclic nucleic acid scaffold modification
  source 1..18: mol_type = other RNA
tgattgctggtcttgttt

SEQ ID NO: 778 - RNA, 18 nt, synthetic construct
  modified_base 18: mod_base = OTHER; note = thymine
  misc_feature 1..18: note = Antisense oligonucleotide
  modified_base 18: mod_base = OTHER; note = misc_feature - bicyclic nucleic acid scaffold modification
  source 1..18: mol_type = other RNA
tgattgctggtcttgttt

SEQ ID NO: 779 - RNA, 18 nt, synthetic construct
  modified_base 1: mod_base = OTHER; note = thymine
  modified_base 18: mod_base = OTHER; note = thymine
  misc_feature 1..18: note = Antisense oligonucleotide
  modified_base 1: mod_base = OTHER; note = misc_feature - bicyclic nucleic acid scaffold modification
  modified_base 18: mod_base = OTHER; note = misc_feature - bicyclic nucleic acid scaffold modification
  source 1..18: mol_type = other RNA
tgattgctggtcttgttt

SEQ ID NO: 780 - RNA, 18 nt, synthetic construct
  modified_base 1: mod_base = OTHER; note = thymine
  misc_feature 1..18: note = Antisense oligonucleotide
  modified_base 1..2: mod_base = OTHER; note = misc_feature - bicyclic nucleic acid scaffold modification
  source 1..18: mol_type = other RNA
tgattgctggtcttgttt

SEQ ID NO: 781 - RNA, 18 nt, synthetic construct
  modified_base 17..18: mod_base = OTHER; note = thymine
  misc_feature 1..18: note = Antisense oligonucleotide
  modified_base 17..18: mod_base = OTHER; note = misc_feature - bicyclic nucleic acid scaffold modification
  source 1..18: mol_type = other RNA
tgattgctggtcttgttt

SEQ ID NO: 782 - RNA, 25 nt, synthetic construct
  misc_feature 1..25: note = Antisense oligonucleotide
  source 1..25: mol_type = other RNA
tgttctagcctcttgattgctggtc

SEQ ID NO: 783 - RNA, 25 nt, synthetic construct
  modified_base 1: mod_base = OTHER; note = thymine
  misc_feature 1..25: note = Antisense oligonucleotide
  modified_base 1: mod_base = OTHER; note = misc_feature - bicyclic nucleic acid scaffold modification
  source 1..25: mol_type = other RNA
tgttctagcctcttgattgctggtc

SEQ ID NO: 784 - RNA, 25 nt, synthetic construct
  misc_feature 1..25: note = Antisense oligonucleotide
  modified_base 25: mod_base = OTHER; note = misc_feature - bicyclic nucleic acid scaffold modification
  source 1..25: mol_type = other RNA
tgttctagcctcttgattgctggtc

SEQ ID NO: 785 - RNA, 25 nt, synthetic construct
  modified_base 1: mod_base = OTHER; note = thymine
  misc_feature 1..25: note = Antisense oligonucleotide
  modified_base 1: mod_base = OTHER; note = misc_feature - bicyclic nucleic acid scaffold modification
  modified_base 25: mod_base = OTHER; note = misc_feature - bicyclic nucleic acid scaffold modification
  source 1..25: mol_type = other RNA
tgttctagcctcttgattgctggtc

SEQ ID NO: 786 - RNA, 25 nt, synthetic construct
  modified_base 1: mod_base = OTHER; note = thymine
  misc_feature 1..25: note = Antisense oligonucleotide
  modified_base 1..2: mod_base = OTHER; note = misc_feature - bicyclic nucleic acid scaffold modification
  source 1..25: mol_type = other RNA
tgttctagcctcttgattgctggtc

SEQ ID NO: 787 - RNA, 25 nt, synthetic construct
  modified_base 24: mod_base = OTHER; note = thymine
  misc_feature 1..25: note = Antisense oligonucleotide
  modified_base 24..25: mod_base = OTHER; note = misc_feature - bicyclic nucleic acid scaffold modification
  source 1..25: mol_type = other RNA
tgttctagcctcttgattgctggtc

SEQ ID NO: 788 - RNA, 22 nt, synthetic construct
  misc_feature 1..22: note = Antisense oligonucleotide
  source 1..22: mol_type = other RNA
tgttctagcctcttgattgctg

SEQ ID NO: 789 - RNA, 22 nt, synthetic construct
  modified_base 1: mod_base = OTHER; note = thymine
  misc_feature 1..22: note = Antisense oligonucleotide
  modified_base 1: mod_base = OTHER; note = misc_feature - bicyclic nucleic acid scaffold modification
  source 1..22: mol_type = other RNA
tgttctagcctcttgattgctg

SEQ ID NO: 790 - RNA, 22 nt, synthetic construct
  misc_feature 1..22: note = Antisense oligonucleotide
  modified_base 22: mod_base = OTHER; note = misc_feature - bicyclic nucleic acid scaffold modification
  source 1..22: mol_type = other RNA
tgttctagcctcttgattgctg

SEQ ID NO: 791 - RNA, 22 nt, synthetic construct
  modified_base 1: mod_base = OTHER; note = thymine
  misc_feature 1..22: note = Antisense oligonucleotide
  modified_base 1: mod_base = OTHER; note = misc_feature - bicyclic nucleic acid scaffold modification
  modified_base 22: mod_base = OTHER; note = misc_feature - bicyclic nucleic acid scaffold modification
  source 1..22: mol_type = other RNA
tgttctagcctcttgattgctg

SEQ ID NO: 792 - RNA, 22 nt, synthetic construct
  modified_base 1: mod_base = OTHER; note = thymine
  misc_feature 1..22: note = Antisense oligonucleotide
  modified_base 1..2: mod_base = OTHER; note = misc_feature - bicyclic nucleic acid scaffold modification
  source 1..22: mol_type = other RNA
tgttctagcctcttgattgctg

SEQ ID NO: 793 - RNA, 22 nt, synthetic construct
  modified_base 21: mod_base = OTHER; note = thymine
  misc_feature 1..22: note = Antisense oligonucleotide
  modified_base 21..22: mod_base = OTHER; note = misc_feature - bicyclic nucleic acid scaffold modification
  source 1..22: mol_type = other RNA
tgttctagcctcttgattgctg

SEQ ID NO: 794 - RNA, 20 nt, synthetic construct
  misc_feature 1..20: note = Antisense oligonucleotide
  source 1..20: mol_type = other RNA
tgttctagcctcttgattgc

SEQ ID NO: 795 - RNA, 20 nt, synthetic construct
  modified_base 1: mod_base = OTHER; note = thymine
  misc_feature 1..20: note = Antisense oligonucleotide
  modified_base 1: mod_base = OTHER; note = misc_feature - bicyclic nucleic acid scaffold modification
  source 1..20: mol_type = other RNA
tgttctagcctcttgattgc

SEQ ID NO: 796 - RNA, 20 nt, synthetic construct
  misc_feature 1..20: note = Antisense oligonucleotide
  modified_base 20: mod_base = OTHER; note = misc_feature - bicyclic nucleic acid scaffold modification
  source 1..20: mol_type = other RNA
tgttctagcctcttgattgc

SEQ ID NO: 797 - RNA, 20 nt, synthetic construct
  modified_base 1: mod_base = OTHER; note = thymine
  misc_feature 1..20: note = Antisense oligonucleotide
  modified_base 1: mod_base = OTHER; note = misc_feature - bicyclic nucleic acid scaffold modification
  modified_base 20: mod_base = OTHER; note = misc_feature - bicyclic nucleic acid scaffold modification
  source 1..20: mol_type = other RNA
tgttctagcctcttgattgc

SEQ ID NO: 798 - RNA, 20 nt, synthetic construct
  modified_base 1: mod_base = OTHER; note = thymine
  misc_feature 1..20: note = Antisense oligonucleotide
  modified_base 1..2: mod_base = OTHER; note = misc_feature - bicyclic nucleic acid scaffold modification
  source 1..20: mol_type = other RNA
tgttctagcctcttgattgc

SEQ ID NO: 799 - RNA, 20 nt, synthetic construct
  misc_feature 1..20: note = Antisense oligonucleotide
  modified_base 19..20: mod_base = OTHER; note = misc_feature - bicyclic nucleic acid scaffold modification
  source 1..20: mol_type = other RNA
tgttctagcctcttgattgc

SEQ ID NO: 800 - RNA, 18 nt, synthetic construct
  misc_feature 1..18: note = Antisense oligonucleotide
  source 1..18: mol_type = other RNA
tgttctagcctcttgatt

SEQ ID NO: 801 - RNA, 18 nt, synthetic construct
  modified_base 1: mod_base = OTHER; note = thymine
  misc_feature 1..18: note = Antisense oligonucleotide
  modified_base 1: mod_base = OTHER; note = misc_feature - bicyclic nucleic acid scaffold modification
  source 1..18: mol_type = other RNA
tgttctagcctcttgatt

SEQ ID NO: 802 - RNA, 18 nt, synthetic construct
  modified_base 18: mod_base = OTHER; note = thymine
  misc_feature 1..18: note = Antisense oligonucleotide
  modified_base 18: mod_base = OTHER; note = misc_feature - bicyclic nucleic acid scaffold modification
  source 1..18: mol_type = other RNA
tgttctagcctcttgatt

SEQ ID NO: 803 - RNA, 18 nt, synthetic construct
  modified_base 1: mod_base = OTHER; note = thymine
  modified_base 18: mod_base = OTHER; note = thymine
  misc_feature 1..18: note = Antisense oligonucleotide
  modified_base 1: mod_base = OTHER; note = misc_feature - bicyclic nucleic acid scaffold modification
  modified_base 18: mod_base = OTHER; note = misc_feature - bicyclic nucleic acid scaffold modification
  source 1..18: mol_type = other RNA
tgttctagcctcttgatt

SEQ ID NO: 804 - RNA, 18 nt, synthetic construct
  modified_base 1: mod_base = OTHER; note = thymine
  misc_feature 1..18: note = Antisense oligonucleotide
  modified_base 1..2: mod_base = OTHER; note = misc_feature - bicyclic nucleic acid scaffold modification
  source 1..18: mol_type = other RNA
tgttctagcctcttgatt

SEQ ID NO: 805 - RNA, 18 nt, synthetic construct
  modified_base 17..18: mod_base = OTHER; note = thymine
  misc_feature 1..18: note = Antisense oligonucleotide
  modified_base 17..18: mod_base = OTHER; note = misc_feature - bicyclic nucleic acid scaffold modification
  source 1..18: mol_type = other RNA
tgttctagcctcttgatt

SEQ ID NO: 806 - RNA, 16 nt, synthetic construct
  misc_feature 1..16: note = Antisense oligonucleotide
  source 1..16: mol_type = other RNA
tgttctagcctcttga

SEQ ID NO: 807 - RNA, 16 nt, synthetic construct
  modified_base 1: mod_base = OTHER; note = thymine
  misc_feature 1..16: note = Antisense oligonucleotide
  modified_base 1: mod_base = OTHER; note = misc_feature - bicyclic nucleic acid scaffold modification
  source 1..16: mol_type = other RNA
tgttctagcctcttga

SEQ ID NO: 808 - RNA, 16 nt, synthetic construct
  misc_feature 1..16: note = Antisense oligonucleotide
  modified_base 16: mod_base = OTHER; note = misc_feature - bicyclic nucleic acid scaffold modification
  source 1..16: mol_type = other RNA
tgttctagcctcttga

SEQ ID NO: 809 - RNA, 16 nt, synthetic construct
  modified_base 1: mod_base = OTHER; note = thymine
  misc_feature 1..16: note = Antisense oligonucleotide
  modified_base 1: mod_base = OTHER; note = misc_feature - bicyclic nucleic acid scaffold modification
  modified_base 16: mod_base = OTHER; note = misc_feature - bicyclic nucleic acid scaffold modification
  source 1..16: mol_type = other RNA
tgttctagcctcttga

SEQ ID NO: 810 - RNA, 16 nt, synthetic construct
  modified_base 1: mod_base = OTHER; note = thymine
  misc_feature 1..16: note = Antisense oligonucleotide
  modified_base 1..2: mod_base = OTHER; note = misc_feature - bicyclic nucleic acid scaffold modification
  source 1..16: mol_type = other RNA
tgttctagcctcttga

SEQ ID NO: 811 - RNA, 16 nt, synthetic construct
  misc_feature 1..16: note = Antisense oligonucleotide
  modified_base 15..16: mod_base = OTHER; note = misc_feature - bicyclic nucleic acid scaffold modification
  source 1..16: mol_type = other RNA
tgttctagcctcttga

SEQ ID NO: 812 - RNA, 22 nt, synthetic construct
  misc_feature 1..22: note = Antisense oligonucleotide
  source 1..22: mol_type = other RNA
tctagcctcttgattgctggtc

SEQ ID NO: 813 - RNA, 22 nt, synthetic construct
  modified_base 1: mod_base = OTHER; note = thymine
  misc_feature 1..22: note = Antisense oligonucleotide
  modified_base 1: mod_base = OTHER; note = misc_feature - bicyclic nucleic acid scaffold modification
  source 1..22: mol_type = other RNA
tctagcctcttgattgctggtc

SEQ ID NO: 814 - RNA, 22 nt, synthetic construct
  misc_feature 1..22: note = Antisense oligonucleotide
  modified_base 22: mod_base = OTHER; note = misc_feature - bicyclic nucleic acid scaffold modification
  source 1..22: mol_type = other RNA
tctagcctcttgattgctggtc

SEQ ID NO: 815 - RNA, 22 nt, synthetic construct
  modified_base 1: mod_base = OTHER; note = thymine
  misc_feature 1..22: note = Antisense oligonucleotide
  modified_base 1: mod_base = OTHER; note = misc_feature - bicyclic nucleic acid scaffold modification
  modified_base 22: mod_base = OTHER; note = misc_feature - bicyclic nucleic acid scaffold modification
  source 1..22: mol_type = other RNA
tctagcctcttgattgctggtc

SEQ ID NO: 816 - RNA, 22 nt, synthetic construct
  modified_base 1: mod_base = OTHER; note = thymine
  misc_feature 1..22: note = Antisense oligonucleotide
  modified_base 1..2: mod_base = OTHER; note = misc_feature - bicyclic nucleic acid scaffold modification
  source 1..22: mol_type = other RNA
tctagcctcttgattgctggtc

SEQ ID NO: 817 - RNA, 22 nt, synthetic construct
  modified_base 21: mod_base = OTHER; note = thymine
  misc_feature 1..22: note = Antisense oligonucleotide
  modified_base 21..22: mod_base = OTHER; note = misc_feature - bicyclic nucleic acid scaffold modification
  source 1..22: mol_type = other RNA
tctagcctcttgattgctggtc

SEQ ID NO: 818 - RNA, 20 nt, synthetic construct
  misc_feature 1..20: note = Antisense oligonucleotide
  source 1..20: mol_type = other RNA
tagcctcttgattgctggtc

SEQ ID NO: 819 - RNA, 20 nt, synthetic construct
  modified_base 1: mod_base = OTHER; note = thymine
  misc_feature 1..20: note = Antisense oligonucleotide
  modified_base 1: mod_base = OTHER; note = misc_feature - bicyclic nucleic acid scaffold modification
  source 1..20: mol_type = other RNA
tagcctcttgattgctggtc

SEQ ID NO: 820 - RNA, 20 nt, synthetic construct
  misc_feature 1..20: note = Antisense oligonucleotide
  modified_base 20: mod_base = OTHER; note = misc_feature - bicyclic nucleic acid scaffold modification
  source 1..20: mol_type = other RNA
tagcctcttgattgctggtc

SEQ ID NO: 821 - RNA, 20 nt, synthetic construct
  modified_base 1: mod_base = OTHER; note = thymine
  misc_feature 1..20: note = Antisense oligonucleotide
  modified_base 1: mod_base = OTHER; note = misc_feature - bicyclic nucleic acid scaffold modification
  modified_base 20: mod_base = OTHER; note = misc_feature - bicyclic nucleic acid scaffold modification
  source 1..20: mol_type = other RNA
tagcctcttgattgctggtc

SEQ ID NO: 822 - RNA, 20 nt, synthetic construct
  modified_base 1: mod_base = OTHER; note = thymine
  misc_feature 1..20: note = Antisense oligonucleotide
  modified_base 1..2: mod_base = OTHER; note = misc_feature - bicyclic nucleic acid scaffold modification
  source 1..20: mol_type = other RNA
tagcctcttgattgctggtc

SEQ ID NO: 823 - RNA, 20 nt, synthetic construct
  modified_base 19: mod_base = OTHER; note = thymine
  misc_feature 1..20: note = Antisense oligonucleotide
  modified_base 19..20: mod_base = OTHER; note = misc_feature - bicyclic nucleic acid scaffold modification
  source 1..20: mol_type = other RNA
tagcctcttgattgctggtc

SEQ ID NO: 824 - RNA, 18 nt, synthetic construct
  misc_feature 1..18: note = Antisense oligonucleotide
  source 1..18: mol_type = other RNA
gcctcttgattgctggtc

SEQ ID NO: 825 - RNA, 18 nt, synthetic construct
  misc_feature 1..18: note = Antisense oligonucleotide
  modified_base 1: mod_base = OTHER; note = misc_feature - bicyclic nucleic acid scaffold modification
  source 1..18: mol_type = other RNA
gcctcttgattgctggtc

SEQ ID NO: 826 - RNA, 18 nt, synthetic construct
  misc_feature 1..18: note = Antisense oligonucleotide
  modified_base 18: mod_base = OTHER; note = misc_feature - bicyclic nucleic acid scaffold modification
  source 1..18: mol_type = other RNA
gcctcttgattgctggtc

SEQ ID NO: 827 - RNA, 18 nt, synthetic construct
  misc_feature 1..18: note = Antisense oligonucleotide
  modified_base 1: mod_base = OTHER; note = misc_feature - bicyclic nucleic acid scaffold modification
  modified_base 18: mod_base = OTHER; note = misc_feature - bicyclic nucleic acid scaffold modification
  source 1..18: mol_type = other RNA
gcctcttgattgctggtc

SEQ ID NO: 828 - RNA, 18 nt, synthetic construct
  misc_feature 1..18: note = Antisense oligonucleotide
  modified_base 1..2: mod_base = OTHER; note = misc_feature - bicyclic nucleic acid scaffold modification
  source 1..18: mol_type = other RNA
gcctcttgattgctggtc

SEQ ID NO: 829 - RNA, 18 nt, synthetic construct
  modified_base 17: mod_base = OTHER; note = thymine
  misc_feature 1..18: note = Antisense oligonucleotide
  modified_base 17..18: mod_base = OTHER; note = misc_feature - bicyclic nucleic acid scaffold modification
  source 1..18: mol_type = other RNA
gcctcttgattgctggtc

SEQ ID NO: 830 - RNA, 16 nt, synthetic construct
  misc_feature 1..16: note = Antisense oligonucleotide
  source 1..16: mol_type = other RNA
ctcttgattgctggtc

SEQ ID NO: 831 - RNA, 16 nt, synthetic construct
  misc_feature 1..16: note = Antisense oligonucleotide
  modified_base 1: mod_base = OTHER; note = misc_feature - bicyclic nucleic acid scaffold modification
  source 1..16: mol_type = other RNA
ctcttgattgctggtc

SEQ ID NO: 832 - RNA, 16 nt, synthetic construct
  misc_feature 1..16: note = Antisense oligonucleotide
  modified_base 16: mod_base = OTHER; note = misc_feature - bicyclic nucleic acid scaffold modification
  source 1..16: mol_type = other RNA
ctcttgattgctggtc

SEQ ID NO: 833 - RNA, 16 nt, synthetic construct
  misc_feature 1..16: note = Antisense oligonucleotide
  modified_base 1: mod_base = OTHER; note = misc_feature - bicyclic nucleic acid scaffold modification
  modified_base 16: mod_base = OTHER; note = misc_feature - bicyclic nucleic acid scaffold modification
  source 1..16: mol_type = other RNA
ctcttgattgctggtc

SEQ ID NO: 834 - RNA, 16 nt, synthetic construct
  modified_base 2: mod_base = OTHER; note = thymine
  misc_feature 1..16: note = Antisense oligonucleotide
  modified_base 1..2: mod_base = OTHER; note = misc_feature - bicyclic nucleic acid scaffold modification
  source 1..16: mol_type = other RNA
ctcttgattgctggtc

SEQ ID NO: 835 - RNA, 16 nt, synthetic construct
  modified_base 15: mod_base = OTHER; note = thymine
  misc_feature 1..16: note = Antisense oligonucleotide
  modified_base 15..16: mod_base = OTHER; note = misc_feature - bicyclic nucleic acid scaffold modification
  source 1..16: mol_type = other RNA
ctcttgattgctggtc

SEQ ID NO: 836 - RNA, 18 nt, synthetic construct
  misc_feature 1..18: note = Antisense oligonucleotide
  source 1..18: mol_type = other RNA
ctagcctcttgattgctg

SEQ ID NO: 837 - RNA, 18 nt, synthetic construct
  misc_feature 1..18: note = Antisense oligonucleotide
  modified_base 1: mod_base = OTHER; note = misc_feature - bicyclic nucleic acid scaffold modification
  source 1..18: mol_type = other RNA
ctagcctcttgattgctg

SEQ ID NO: 838 - RNA, 18 nt, synthetic construct
  misc_feature 1..18: note = Antisense oligonucleotide
  modified_base 18: mod_base = OTHER; note = misc_feature - bicyclic nucleic acid scaffold modification
  source 1..18: mol_type = other RNA
ctagcctcttgattgctg

SEQ ID NO: 839 - RNA, 18 nt, synthetic construct
  misc_feature 1..18: note = Antisense oligonucleotide
  modified_base 1: mod_base = OTHER; note = misc_feature - bicyclic nucleic acid scaffold modification
  modified_base 18: mod_base = OTHER; note = misc_feature - bicyclic nucleic acid scaffold modification
  source 1..18: mol_type = other RNA
ctagcctcttgattgctg

SEQ ID NO: 840 - RNA, 18 nt, synthetic construct
  modified_base 2: mod_base = OTHER; note = thymine
  misc_feature 1..18: note = Antisense oligonucleotide
  modified_base 1..2: mod_base = OTHER; note = misc_feature - bicyclic nucleic acid scaffold modification
  source 1..18: mol_type = other RNA
ctagcctcttgattgctg

SEQ ID NO: 841 - RNA, 18 nt, synthetic construct
  modified_base 17: mod_base = OTHER; note = thymine
  misc_feature 1..18: note = Antisense oligonucleotide
  modified_base 17..18: mod_base = OTHER; note = misc_feature - bicyclic nucleic acid scaffold modification
  source 1..18: mol_type = other RNA
ctagcctcttgattgctg

SEQ ID NO: 842 - RNA, 18 nt, synthetic construct
  misc_feature 1..18: note = Antisense oligonucleotide
  source 1..18: mol_type = other RNA
ctgttgcctccggttctg

SEQ ID NO: 843 - RNA, 18 nt, synthetic construct
  misc_feature 1..18: note = Antisense oligonucleotide
  modified_base 1: mod_base = OTHER; note = misc_feature - bicyclic nucleic acid scaffold modification
  source 1..18: mol_type = other RNA
ctgttgcctccggttctg

SEQ ID NO: 844 - RNA, 18 nt, synthetic construct
  misc_feature 1..18: note = Antisense oligonucleotide
  modified_base 18: mod_base = OTHER; note = misc_feature - bicyclic nucleic acid scaffold modification
  source 1..18: mol_type = other RNA
ctgttgcctccggttctg

SEQ ID NO: 845 - RNA, 18 nt, synthetic construct
  misc_feature 1..18: note = Antisense oligonucleotide
  modified_base 1: mod_base = OTHER; note = misc_feature - bicyclic nucleic acid scaffold modification
  modified_base 18: mod_base = OTHER; note = misc_feature - bicyclic nucleic acid scaffold modification
  source 1..18: mol_type = other RNA
ctgttgcctccggttctg

SEQ ID NO: 846 - RNA, 18 nt, synthetic construct
  modified_base 2: mod_base = OTHER; note = thymine
  misc_feature 1..18: note = Antisense oligonucleotide
  modified_base 1..2: mod_base = OTHER; note = misc_feature - bicyclic nucleic acid scaffold modification
  source 1..18: mol_type = other RNA
ctgttgcctccggttctg

SEQ ID NO: 847 - RNA, 18 nt, synthetic construct
  modified_base 17: mod_base = OTHER; note = thymine
  misc_feature 1..18: note = Antisense oligonucleotide
  modified_base 17..18: mod_base = OTHER; note = misc_feature - bicyclic nucleic acid scaffold modification
  source 1..18: mol_type = other RNA
ctgttgcctccggttctg

SEQ ID NO: 848 - RNA, 20 nt, synthetic construct
  misc_feature 1..20: note = Antisense oligonucleotide
  source 1..20: mol_type = other RNA
ctgttgcctccggttctgaa

SEQ ID NO: 849 - RNA, 20 nt, synthetic construct
  misc_feature 1..20: note = Antisense oligonucleotide
  modified_base 1: mod_base = OTHER; note = misc_feature - bicyclic nucleic acid scaffold modification
  source 1..20: mol_type = other RNA
ctgttgcctccggttctgaa

SEQ ID NO: 850 - RNA, 20 nt, synthetic construct
  misc_feature 1..20: note = Antisense oligonucleotide
  modified_base 20: mod_base = OTHER; note = misc_feature - bicyclic nucleic acid scaffold modification
  source 1..20: mol_type = other RNA
ctgttgcctccggttctgaa

SEQ ID NO: 851 - RNA, 20 nt, synthetic construct
  misc_feature 1..20: note = Antisense oligonucleotide
  modified_base 1: mod_base = OTHER; note = misc_feature - bicyclic nucleic acid scaffold modification
  modified_base 20: mod_base = OTHER; note = misc_feature - bicyclic nucleic acid scaffold modification
  source 1..20: mol_type = other RNA
ctgttgcctccggttctgaa

SEQ ID NO: 852 - RNA, 20 nt, synthetic construct
  modified_base 2: mod_base = OTHER; note = thymine
  misc_feature 1..20: note = Antisense oligonucleotide
  modified_base 1..2: mod_base = OTHER; note = misc_feature - bicyclic nucleic acid scaffold modification
  source 1..20: mol_type = other RNA
ctgttgcctccggttctgaa

SEQ ID NO: 853 - RNA, 20 nt, synthetic construct
  misc_feature 1..20: note = Antisense oligonucleotide
  modified_base 19..20: mod_base = OTHER; note = misc_feature - bicyclic nucleic acid scaffold modification
  source 1..20: mol_type = other RNA
ctgttgcctccggttctgaa

SEQ ID NO: 854 - RNA, 20 nt, synthetic construct
  misc_feature 1..20: note = Antisense oligonucleotide
  source 1..20: mol_type = other RNA
ctccggttctgaaggtgttc

SEQ ID NO: 855 - RNA, 20 nt, synthetic construct
  misc_feature 1..20: note = Antisense oligonucleotide
  modified_base 1: mod_base = OTHER; note = misc_feature - bicyclic nucleic acid scaffold modification
  source 1..20: mol_type = other RNA
ctccggttctgaaggtgttc

SEQ ID NO: 856 - RNA, 20 nt, synthetic construct
  misc_feature 1..20: note = Antisense oligonucleotide
  modified_base 20: mod_base = OTHER; note = misc_feature - bicyclic nucleic acid scaffold modification
  source 1..20: mol_type = other RNA
ctccggttctgaaggtgttc

SEQ ID NO: 857 - RNA, 20 nt, synthetic construct
  misc_feature 1..20: note = Antisense oligonucleotide
  modified_base 1: mod_base = OTHER; note = misc_feature - bicyclic nucleic acid scaffold modification
  modified_base 20: mod_base = OTHER; note = misc_feature - bicyclic nucleic acid scaffold modification
  source 1..20: mol_type = other RNA
ctccggttctgaaggtgttc

SEQ ID NO: 858 - RNA, 20 nt, synthetic construct
  modified_base 2: mod_base = OTHER; note = thymine
  misc_feature 1..20: note = Antisense oligonucleotide
  modified_base 1..2: mod_base = OTHER; note = misc_feature - bicyclic nucleic acid scaffold modification
  source 1..20: mol_type = other RNA
ctccggttctgaaggtgttc

SEQ ID NO: 859 - RNA, 20 nt, synthetic construct
  modified_base 19: mod_base = OTHER; note = thymine
  misc_feature 1..20: note = Antisense oligonucleotide
  modified_base 19..20: mod_base = OTHER; note = misc_feature - bicyclic nucleic acid scaffold modification
  source 1..20: mol_type = other RNA
ctccggttctgaaggtgttc

SEQ ID NO: 860 - RNA, 25 nt, synthetic construct
  misc_feature 1..25: note = Antisense oligonucleotide
  source 1..25: mol_type = other RNA
  modified_base 1: mod_base = OTHER; note = 2'-O-methyl guanosine phosphorothioate
  modified_base 2: mod_base = OTHER; note = 2'-O-methyl uridine phosphorothioate
  modified_base 3: mod_base = OTHER; note = 2'-O-methyl uridine phosphorothioate
  modified_base 4: mod_base = OTHER; note = 2'-O-methyl guanosine phosphorothioate
  modified_base 5: mod_base = OTHER; note = 5-methylcytosine phosphorothioate
  modified_base 6: mod_base = OTHER; note = 5-methylcytosine phosphorothioate
  modified_base 7: mod_base = OTHER; note = 2'-O-methyl uridine phosphorothioate
  modified_base 8: mod_base = OTHER; note = 5-methylcytosine phosphorothioate
  modified_base 9: mod_base = OTHER; note = 5-methylcytosine phosphorothioate
  modified_base 10: mod_base = OTHER; note = 2'-O-methyl guanosine phosphorothioate
  modified_base 11: mod_base = OTHER; note = 2'-O-methyl guanosine phosphorothioate
  modified_base 12: mod_base = OTHER; note = 2'-O-methyl uridine phosphorothioate
  modified_base 13: mod_base = OTHER; note = 2'-O-methyl uridine phosphorothioate
  modified_base 14: mod_base = OTHER; note = 5-methylcytosine phosphorothioate
  modified_base 15: mod_base = OTHER; note = 2'-O-methyl uridine phosphorothioate
  modified_base 16: mod_base = OTHER; note = 2'-O-methyl guanosine phosphorothioate
  modified_base 17: mod_base = OTHER; note = 2'-O-methyl adenosine phosphorothioate
  modified_base 18: mod_base = OTHER; note = 2'-O-methyl adenosine phosphorothioate
  modified_base 19: mod_base = OTHER; note = 2'-O-methyl guanosine phosphorothioate
  modified_base 20: mod_base = OTHER; note = 2'-O-methyl guanosine phosphorothioate
  modified_base 21: mod_base = OTHER; note = 2'-O-methyl uridine phosphorothioate
  modified_base 22: mod_base = OTHER; note = 2'-O-methyl guanosine phosphorothioate
  modified_base 23: mod_base = OTHER; note = 2'-O-methyl uridine phosphorothioate
  modified_base 24: mod_base = OTHER; note = 2'-O-methyl uridine phosphorothioate
  modified_base 25: mod_base = OTHER; note = 5-methylcytosine
gttgcctccggttctgaaggtgttc

SEQ ID NO: 861 - RNA, 25 nt, synthetic construct
  misc_feature 1..25: note = Antisense oligonucleotide
  modified_base 1: mod_base = OTHER; note = misc_feature - bicyclic nucleic acid scaffold modification
  source 1..25: mol_type = other RNA
gttgcctccggttctgaaggtgttc

SEQ ID NO: 862 - RNA, 25 nt, synthetic construct
  misc_feature 1..25: note = Antisense oligonucleotide
  modified_base 25: mod_base = OTHER; note = misc_feature - bicyclic nucleic acid scaffold modification
  source 1..25: mol_type = other RNA
gttgcctccggttctgaaggtgttc

SEQ ID NO: 863 - RNA, 25 nt, synthetic construct
  misc_feature 1..25: note = Antisense oligonucleotide
  source 1..25: mol_type = other RNA
  modified_base 1: mod_base = OTHER; note = misc_feature - locked bicyclic nucleic acid scaffold modification phosphorothioate
  modified_base 2: mod_base = OTHER; note = 2'-O-methyl uridine phosphorothioate
  modified_base 3: mod_base = OTHER; note = 2'-O-methyl uridine phosphorothioate
  modified_base 4: mod_base = OTHER; note = 2'-O-methyl guanosine phosphorothioate
  modified_base 5: mod_base = OTHER; note = 5-methylcytosine phosphorothioate
  modified_base 6: mod_base = OTHER; note = 5-methylcytosine phosphorothioate
  modified_base 7: mod_base = OTHER; note = 2'-O-methyl uridine phosphorothioate
  modified_base 8: mod_base = OTHER; note = 5-methylcytosine phosphorothioate
  modified_base 9: mod_base = OTHER; note = 5-methylcytosine phosphorothioate
  modified_base 10: mod_base = OTHER; note = 2'-O-methyl guanosine phosphorothioate
  modified_base 11: mod_base = OTHER; note = 2'-O-methyl guanosine phosphorothioate
  modified_base 12: mod_base = OTHER; note = 2'-O-methyl uridine phosphorothioate
  modified_base 13: mod_base = OTHER; note = 2'-O-methyl uridine phosphorothioate
  modified_base 14: mod_base = OTHER; note = 5-methylcytosine phosphorothioate
  modified_base 15: mod_base = OTHER; note = 2'-O-methyl uridine phosphorothioate
  modified_base 16: mod_base = OTHER; note = 2'-O-methyl guanosine phosphorothioate
  modified_base 17: mod_base = OTHER; note = 2'-O-methyl adenosine phosphorothioate
  modified_base 18: mod_base = OTHER; note = 2'-O-methyl adenosine phosphorothioate
  modified_base 19: mod_base = OTHER; note = 2'-O-methyl guanosine phosphorothioate
  modified_base 20: mod_base = OTHER; note = 2'-O-methyl guanosine phosphorothioate
  modified_base 21: mod_base = OTHER; note = 2'-O-methyl uridine phosphorothioate
  modified_base 22: mod_base = OTHER; note = 2'-O-methyl guanosine phosphorothioate
  modified_base 23: mod_base = OTHER; note = 2'-O-methyl uridine phosphorothioate
  modified_base 24: mod_base = OTHER; note = 2'-O-methyl uridine phosphorothioate
  modified_base 25: mod_base = OTHER; note = misc_feature - locked 5-methylcytosine bicyclic nucleic acid scaffold modification
gttgcctccggttctgaaggtgttc

SEQ ID NO: 864 - RNA, 25 nt, synthetic construct
  modified_base 2: mod_base = OTHER; note = thymine
  misc_feature 1..25: note = Antisense oligonucleotide
  modified_base 1..2: mod_base = OTHER; note = misc_feature - bicyclic nucleic acid scaffold modification
  source 1..25: mol_type = other RNA
gttgcctccggttctgaaggtgttc

SEQ ID NO: 865 - RNA, 25 nt, synthetic construct
  modified_base 24: mod_base = OTHER; note = thymine
  misc_feature 1..25: note = Antisense oligonucleotide
  modified_base 24..25: mod_base = OTHER; note = misc_feature - bicyclic nucleic acid scaffold modification
  source 1..25: mol_type = other RNA
gttgcctccggttctgaaggtgttc

SEQ ID NO: 866 - RNA, 24 nt, synthetic construct
  misc_feature 1..24: note = Antisense oligonucleotide
  source 1..24: mol_type = other RNA
gttctgaaggtgttcttgtacttc

SEQ ID NO: 867 - RNA, 24 nt, synthetic construct
  misc_feature 1..24: note = Antisense oligonucleotide
  modified_base 1: mod_base = OTHER; note = misc_feature - bicyclic nucleic acid scaffold modification
  source 1..24: mol_type = other RNA
gttctgaaggtgttcttgtacttc

SEQ ID NO: 868 - RNA, 24 nt, synthetic construct
  misc_feature 1..24: note = Antisense oligonucleotide
  modified_base 24: mod_base = OTHER; note = misc_feature - bicyclic nucleic acid scaffold modification
  source 1..24: mol_type = other RNA
gttctgaaggtgttcttgtacttc

SEQ ID NO: 869 - RNA, 24 nt, synthetic construct
  misc_feature 1..24: note = Antisense oligonucleotide
  modified_base 1: mod_base = OTHER; note = misc_feature - bicyclic nucleic acid scaffold modification
  modified_base 24: mod_base = OTHER; note = misc_feature - bicyclic nucleic acid scaffold modification
  source 1..24: mol_type = other RNA
gttctgaaggtgttcttgtacttc

SEQ ID NO: 870 - RNA, 24 nt, synthetic construct
  modified_base 2: mod_base = OTHER; note = thymine
  misc_feature 1..24: note = Antisense oligonucleotide
  modified_base 1..2: mod_base = OTHER; note = misc_feature - bicyclic nucleic acid scaffold modification
  source 1..24: mol_type = other RNA
gttctgaaggtgttcttgtacttc

SEQ ID NO: 871 - RNA, 24 nt, synthetic construct
  modified_base 23: mod_base = OTHER; note = thymine
  misc_feature 1..24: note = Antisense oligonucleotide
  modified_base 23..24: mod_base = OTHER; note = misc_feature - bicyclic nucleic acid scaffold modification
  source 1..24: mol_type = other RNA
gttctgaaggtgttcttgtacttc

SEQ ID NO: 872 - RNA, 22 nt, synthetic construct
  misc_feature 1..22: note = Antisense oligonucleotide
  source 1..22: mol_type = other RNA
gttctgaaggtgttcttgtact

SEQ ID NO: 873 - RNA, 22 nt, synthetic construct
  misc_feature 1..22: note = Antisense oligonucleotide
  modified_base 1: mod_base = OTHER; note = misc_feature - bicyclic nucleic acid scaffold modification
  source 1..22: mol_type = other RNA
gttctgaaggtgttcttgtact

SEQ ID NO: 874 - RNA, 22 nt, synthetic construct
  modified_base 22: mod_base = OTHER; note = thymine
  misc_feature 1..22: note = Antisense oligonucleotide
  modified_base 22: mod_base = OTHER; note = misc_feature - bicyclic nucleic acid scaffold modification
  source 1..22: mol_type = other RNA
gttctgaaggtgttcttgtact

SEQ ID NO: 875 - RNA, 22 nt, synthetic construct
  modified_base 22: mod_base = OTHER; note = thymine
  misc_feature 1..22: note = Antisense oligonucleotide
  modified_base 1: mod_base = OTHER; note = misc_feature - bicyclic nucleic acid scaffold modification
  modified_base 22: mod_base = OTHER; note = misc_feature - bicyclic nucleic acid scaffold modification
  source 1..22: mol_type = other RNA
gttctgaaggtgttcttgtact

SEQ ID NO: 876 - RNA, 22 nt, synthetic construct
  modified_base 2: mod_base = OTHER; note = thymine
  misc_feature 1..22: note = Antisense oligonucleotide
  modified_base 1..2: mod_base = OTHER; note = misc_feature - bicyclic nucleic acid scaffold modification
  source 1..22: mol_type = other RNA
gttctgaaggtgttcttgtact

SEQ ID NO: 877 - RNA, 22 nt, synthetic construct
  modified_base 22: mod_base = OTHER; note = thymine
  misc_feature 1..22: note = Antisense oligonucleotide
  modified_base 21..22: mod_base = OTHER; note = misc_feature - bicyclic nucleic acid scaffold modification
  source 1..22: mol_type = other RNA
gttctgaaggtgttcttgtact

SEQ ID NO: 878 - RNA, 20 nt, synthetic construct
  misc_feature 1..20: note = Antisense oligonucleotide
  source 1..20: mol_type = other RNA
gttctgaaggtgttcttgta

SEQ ID NO: 879 - RNA, 20 nt, synthetic construct
  misc_feature 1..20: note = Antisense oligonucleotide
  modified_base 1: mod_base = OTHER; note = misc_feature - bicyclic nucleic acid scaffold modification
  source 1..20: mol_type = other RNA
gttctgaaggtgttcttgta

SEQ ID NO: 880 - RNA, 20 nt, synthetic construct
  misc_feature 1..20: note = Antisense oligonucleotide
  modified_base 20: mod_base = OTHER; note = misc_feature - bicyclic nucleic acid scaffold modification
  source 1..20: mol_type = other RNA
gttctgaaggtgttcttgta

SEQ ID NO: 881 - RNA, 20 nt, synthetic construct
  misc_feature 1..20: note = Antisense oligonucleotide
  modified_base 1: mod_base = OTHER; note = misc_feature - bicyclic nucleic acid scaffold modification
  modified_base 20: mod_base = OTHER; note = misc_feature - bicyclic nucleic acid scaffold modification
  source 1..20: mol_type = other RNA
gttctgaaggtgttcttgta

SEQ ID NO: 882 - RNA, 20 nt, synthetic construct
  modified_base 2: mod_base = OTHER; note = thymine
  misc_feature 1..20: note = Antisense oligonucleotide
  modified_base 1..2: mod_base = OTHER; note = misc_feature - bicyclic nucleic acid scaffold modification
  source 1..20: mol_type = other RNA
gttctgaaggtgttcttgta

SEQ ID NO: 883 - RNA, 20 nt, synthetic construct
  modified_base 19: mod_base = OTHER; note = thymine
  misc_feature 1..20: note = Antisense oligonucleotide
  modified_base 19..20: mod_base = OTHER; note = misc_feature - bicyclic nucleic acid scaffold modification
  source 1..20: mol_type = other RNA
gttctgaaggtgttcttgta

SEQ ID NO: 884 - RNA, 18 nt, synthetic construct
  misc_feature 1..18: note = Antisense oligonucleotide
  source 1..18: mol_type = other RNA
gttctgaaggtgttcttg

SEQ ID NO: 885 - RNA, 18 nt, synthetic construct
  misc_feature 1..18: note = Antisense oligonucleotide
  modified_base 1: mod_base = OTHER; note = misc_feature - bicyclic nucleic acid scaffold modification
  source 1..18: mol_type = other RNA
gttctgaaggtgttcttg

SEQ ID NO: 886 - RNA, 18 nt, synthetic construct
  misc_feature 1..18: note = Antisense oligonucleotide
  modified_base 18: mod_base = OTHER; note = misc_feature - bicyclic nucleic acid scaffold modification
  source 1..18: mol_type = other RNA
gttctgaaggtgttcttg

SEQ ID NO: 887 - RNA, 18 nt, synthetic construct
  misc_feature 1..18: note = Antisense oligonucleotide
  modified_base 1: mod_base = OTHER; note = misc_feature - bicyclic nucleic acid scaffold modification
  modified_base 18: mod_base = OTHER; note = misc_feature - bicyclic nucleic acid scaffold modification
  source 1..18: mol_type = other RNA
gttctgaaggtgttcttg

SEQ ID NO: 888 - RNA, 18 nt, synthetic construct
  modified_base 2: mod_base = OTHER; note = thymine
  misc_feature 1..18: note = Antisense oligonucleotide
  modified_base 1..2: mod_base = OTHER; note = misc_feature - bicyclic nucleic acid scaffold modification
  source 1..18: mol_type = other RNA
gttctgaaggtgttcttg

SEQ ID NO: 889 - RNA, 18 nt, synthetic construct
  modified_base 17: mod_base = OTHER; note = thymine
  misc_feature 1..18: note = Antisense oligonucleotide
  modified_base 17..18: mod_base = OTHER; note = misc_feature - bicyclic nucleic acid scaffold modification
  source 1..18: mol_type = other RNA
gttctgaaggtgttcttg

SEQ ID NO: 890 - RNA, 16 nt, synthetic construct
  misc_feature 1..16: note = Antisense oligonucleotide
  source 1..16: mol_type = other RNA
gttctgaaggtgttct

SEQ ID NO: 891 - RNA, 16 nt, synthetic construct
  misc_feature 1..16: note = Antisense oligonucleotide
  modified_base 1: mod_base = OTHER; note = misc_feature - bicyclic nucleic acid scaffold modification
  source 1..16: mol_type = other RNA
gttctgaaggtgttct

SEQ ID NO: 892 - RNA, 16 nt, synthetic construct
  modified_base 16: mod_base = OTHER; note = thymine
  misc_feature 1..16: note = Antisense oligonucleotide
  modified_base 16: mod_base = OTHER; note = misc_feature - bicyclic nucleic acid scaffold modification
  source 1..16: mol_type = other RNA
gttctgaaggtgttct

SEQ ID NO: 893 - RNA, 16 nt, synthetic construct
  modified_base 16: mod_base = OTHER; note = thymine
  misc_feature 1..16: note = Antisense oligonucleotide
  modified_base 1: mod_base = OTHER; note = misc_feature - bicyclic nucleic acid scaffold modification
  modified_base 16: mod_base = OTHER; note = misc_feature - bicyclic nucleic acid scaffold modification
  source 1..16: mol_type = other RNA
gttctgaaggtgttct

SEQ ID NO: 894 - RNA, 16 nt, synthetic construct
  modified_base 2: mod_base = OTHER; note = thymine
  misc_feature 1..16: note = Antisense oligonucleotide
  modified_base 1..2: mod_base = OTHER; note = misc_feature - bicyclic nucleic acid scaffold modification
  source 1..16: mol_type = other RNA
gttctgaaggtgttct

SEQ ID NO: 895 - RNA, 16 nt, synthetic construct
  modified_base 16: mod_base = OTHER; note = thymine
  misc_feature 1..16: note = Antisense oligonucleotide
  modified_base 15..16: mod_base = OTHER; note = misc_feature - bicyclic nucleic acid scaffold modification
  source 1..16: mol_type = other RNA
gttctgaaggtgttct

SEQ ID NO: 896 - RNA, 22 nt, synthetic construct
  misc_feature 1..22: note = Antisense oligonucleotide
  source 1..22: mol_type = other RNA
tctgaaggtgttcttgtacttc

SEQ ID NO: 897 - RNA, 22 nt, synthetic construct
  modified_base 1: mod_base = OTHER; note = thymine
  misc_feature 1..22: note = Antisense oligonucleotide
  modified_base 1: mod_base = OTHER; note = misc_feature - bicyclic nucleic acid scaffold modification
  source 1..22: mol_type = other RNA
tctgaaggtgttcttgtacttc

SEQ ID NO: 898 - RNA, 22 nt, synthetic construct
  misc_feature 1..22: note = Antisense oligonucleotide
  modified_base 22: mod_base = OTHER; note = misc_feature - bicyclic nucleic acid scaffold modification
  source 1..22: mol_type = other RNA
tctgaaggtgttcttgtacttc

SEQ ID NO: 899 - RNA, 22 nt, synthetic construct
  modified_base 1: mod_base = OTHER; note = thymine
  misc_feature 1..22: note = Antisense oligonucleotide
  modified_base 1: mod_base = OTHER; note = misc_feature - bicyclic nucleic acid scaffold modification
  modified_base 22: mod_base = OTHER; note = misc_feature - bicyclic nucleic acid scaffold modification
  source 1..22: mol_type = other RNA
tctgaaggtgttcttgtacttc

SEQ ID NO: 900 - RNA, 22 nt, synthetic construct
  modified_base 1: mod_base = OTHER; note = thymine
  misc_feature 1..22: note = Antisense oligonucleotide
  modified_base 1..2: mod_base = OTHER; note = misc_feature - bicyclic nucleic acid scaffold modification
  source 1..22: mol_type = other RNA
tctgaaggtgttcttgtacttc

SEQ ID NO: 901 - RNA, 22 nt, synthetic construct
  modified_base 21: mod_base = OTHER; note = thymine
  misc_feature 1..22: note = Antisense oligonucleotide
  modified_base 21..22: mod_base = OTHER; note = misc_feature - bicyclic nucleic acid scaffold modification
  source 1..22: mol_type = other RNA
tctgaaggtgttcttgtacttc

SEQ ID NO: 902 - RNA, 20 nt, synthetic construct
  misc_feature 1..20: note = Antisense oligonucleotide
  source 1..20: mol_type = other RNA
tgaaggtgttcttgtacttc

SEQ ID NO: 903 - RNA, 20 nt, synthetic construct
  modified_base 1: mod_base = OTHER; note = thymine
  misc_feature 1..20: note = Antisense oligonucleotide
  modified_base 1: mod_base = OTHER; note = misc_feature - bicyclic nucleic acid scaffold modification
  source 1..20: mol_type = other RNA
tgaaggtgttcttgtacttc

SEQ ID NO: 904 - RNA, 20 nt, synthetic construct
  misc_feature 1..20: note = Antisense oligonucleotide
  modified_base 20: mod_base = OTHER; note = misc_feature - bicyclic nucleic acid scaffold modification
  source 1..20: mol_type = other RNA
tgaaggtgttcttgtacttc

SEQ ID NO: 905 - RNA, 20 nt, synthetic construct
  modified_base 1: mod_base = OTHER; note = thymine
  misc_feature 1..20: note = Antisense oligonucleotide
  modified_base 1: mod_base = OTHER; note = misc_feature - bicyclic nucleic acid scaffold modification
  modified_base 20: mod_base = OTHER; note = misc_feature - bicyclic nucleic acid scaffold modification
  source 1..20: mol_type = other RNA
tgaaggtgttcttgtacttc

SEQ ID NO: 906 - RNA, 20 nt, synthetic construct
  modified_base 1: mod_base = OTHER; note = thymine
  misc_feature 1..20: note = Antisense oligonucleotide
  modified_base 1..2: mod_base = OTHER; note = misc_feature - bicyclic nucleic acid scaffold modification
  source 1..20: mol_type = other RNA
tgaaggtgttcttgtacttc

SEQ ID NO: 907 - RNA, 20 nt, synthetic construct
  modified_base 19: mod_base = OTHER; note = thymine
  misc_feature 1..20: note = Antisense oligonucleotide
  modified_base 19..20: mod_base = OTHER; note = misc_feature - bicyclic nucleic acid scaffold modification
  source 1..20: mol_type = other RNA
tgaaggtgttcttgtacttc

SEQ ID NO: 908 - RNA, 18 nt, synthetic construct
  misc_feature 1..18: note = Antisense oligonucleotide
  source 1..18: mol_type = other RNA
aaggtgttcttgtacttc

SEQ ID NO: 909 - RNA, 18 nt, synthetic construct
  misc_feature 1..18: note = Antisense oligonucleotide
  modified_base 1: mod_base = OTHER; note = misc_feature - bicyclic nucleic acid scaffold modification
  source 1..18: mol_type = other RNA
aaggtgttcttgtacttc

SEQ ID NO: 910 - RNA, 18 nt, synthetic construct
  misc_feature 1..18: note = Antisense oligonucleotide
  modified_base 18: mod_base = OTHER; note = misc_feature - bicyclic nucleic acid scaffold modification
  source 1..18: mol_type = other RNA
aaggtgttcttgtacttc

SEQ ID NO: 911 - RNA, 18 nt, synthetic construct
  misc_feature 1..18: note = Antisense oligonucleotide
  modified_base 1: mod_base = OTHER; note = misc_feature - bicyclic nucleic acid scaffold modification
  modified_base 18: mod_base = OTHER; note = misc_feature - bicyclic nucleic acid scaffold modification
  source 1..18: mol_type = other RNA
aaggtgttcttgtacttc

SEQ ID NO: 912 - RNA, 18 nt, synthetic construct
  misc_feature 1..18: note = Antisense oligonucleotide
  modified_base 1..2: mod_base = OTHER; note = misc_feature - bicyclic nucleic acid scaffold modification
  source 1..18: mol_type = other RNA
aaggtgttcttgtacttc

SEQ ID NO: 913 - RNA, 18 nt, synthetic construct
  modified_base 17: mod_base = OTHER; note = thymine
  misc_feature 1..18: note = Antisense oligonucleotide
  modified_base 17..18: mod_base = OTHER; note = misc_feature - bicyclic nucleic acid scaffold modification
  source 1..18: mol_type = other RNA
aaggtgttcttgtacttc

SEQ ID NO: 914 - RNA, 16 nt, synthetic construct
  misc_feature 1..16: note = Antisense oligonucleotide
  source 1..16: mol_type = other RNA
ggtgttcttgtacttc

SEQ ID NO: 915 - RNA, 16 nt, synthetic construct
  misc_feature 1..16: note = Antisense oligonucleotide
  modified_base 1: mod_base = OTHER; note = misc_feature - bicyclic nucleic acid scaffold modification
  source 1..16: mol_type = other RNA
ggtgttcttgtacttc

SEQ ID NO: 916 - RNA, 16 nt, synthetic construct
  misc_feature 1..16: note = Antisense oligonucleotide
  modified_base 16: mod_base = OTHER; note = misc_feature - bicyclic nucleic acid scaffold modification
  source 1..16: mol_type = other RNA
ggtgttcttgtacttc

SEQ ID NO: 917 - RNA, 16 nt, synthetic construct
  misc_feature 1..16: note = Antisense oligonucleotide
  modified_base 1: mod_base = OTHER; note = misc_feature - bicyclic nucleic acid scaffold modification
  modified_base 16: mod_base = OTHER; note = misc_feature - bicyclic nucleic acid scaffold modification
  source 1..16: mol_type = other RNA
ggtgttcttgtacttc

SEQ ID NO: 918 - RNA, 16 nt, synthetic construct
  misc_feature 1..16: note = Antisense oligonucleotide
  modified_base 1..2: mod_base = OTHER; note = misc_feature - bicyclic nucleic acid scaffold modification
  source 1..16: mol_type = other RNA
ggtgttcttgtacttc

SEQ ID NO: 919 - RNA, 16 nt, synthetic construct
  modified_base 15: mod_base = OTHER; note = thymine
  misc_feature 1..16: note = Antisense oligonucleotide
  modified_base 15..16: mod_base = OTHER; note = misc_feature - bicyclic nucleic acid scaffold modification
  source 1..16: mol_type = other RNA
ggtgttcttgtacttc

SEQ ID NO: 920 - RNA, 25 nt, synthetic construct
  misc_feature 1..25: note = Antisense oligonucleotide
  source 1..25: mol_type = other RNA
agcttccagccattgtgttgaatcc

SEQ ID NO: 921 - RNA, 25 nt, synthetic construct
  misc_feature 1..25: note = Antisense oligonucleotide
  modified_base 1: mod_base = OTHER; note = misc_feature - bicyclic nucleic acid scaffold modification
  source 1..25: mol_type = other RNA
agcttccagccattgtgttgaatcc

SEQ ID NO: 922 - RNA, 25 nt, synthetic construct
  misc_feature 1..25: note = Antisense oligonucleotide
  modified_base 25: mod_base = OTHER; note = misc_feature - bicyclic nucleic acid scaffold modification
  source 1..25: mol_type = other RNA
agcttccagccattgtgttgaatcc

SEQ ID NO: 923 - RNA, 25 nt, synthetic construct
  misc_feature 1..25: note = Antisense oligonucleotide
  modified_base 1: mod_base = OTHER; note = misc_feature - bicyclic nucleic acid scaffold modification
  modified_base 25: mod_base = OTHER; note = misc_feature - bicyclic nucleic acid scaffold modification
  source 1..25: mol_type = other RNA
agcttccagccattgtgttgaatcc

SEQ ID NO: 924 - RNA, 25 nt, synthetic construct
  misc_feature 1..25: note = Antisense oligonucleotide
  modified_base 1..2: mod_base = OTHER; note = misc_feature - bicyclic nucleic acid scaffold modification
  source 1..25: mol_type = other RNA
agcttccagccattgtgttgaatcc

SEQ ID NO: 925 - RNA, 25 nt, synthetic construct
  misc_feature 1..25: note = Antisense oligonucleotide
  modified_base 24..25: mod_base = OTHER; note = misc_feature - bicyclic nucleic acid scaffold modification
  source 1..25: mol_type = other RNA
agcttccagccattgtgttgaatcc

SEQ ID NO: 926 - RNA, 22 nt, synthetic construct
  misc_feature 1..22: note = Antisense oligonucleotide
  source 1..22: mol_type = other RNA
agcttccagccattgtgttgaa

SEQ ID NO: 927 - RNA, 22 nt, synthetic construct
  misc_feature 1..22: note = Antisense oligonucleotide
  modified_base 1: mod_base = OTHER; note = misc_feature - bicyclic nucleic acid scaffold modification
  source 1..22: mol_type = other RNA
agcttccagccattgtgttgaa

SEQ ID NO: 928 - RNA, 22 nt, synthetic construct
  misc_feature 1..22: note = Antisense oligonucleotide
  modified_base 22: mod_base = OTHER; note = misc_feature - bicyclic nucleic acid scaffold modification
  source 1..22: mol_type = other RNA
agcttccagccattgtgttgaa

SEQ ID NO: 929 - RNA, 22 nt, synthetic construct
  misc_feature 1..22: note = Antisense oligonucleotide
  modified_base 1: mod_base = OTHER; note = misc_feature - bicyclic nucleic acid scaffold modification
  modified_base 22: mod_base = OTHER; note = misc_feature - bicyclic nucleic acid scaffold modification
  source 1..22: mol_type = other RNA
agcttccagccattgtgttgaa

SEQ ID NO: 930 - RNA, 22 nt, synthetic construct
  misc_feature 1..22: note = Antisense oligonucleotide
  modified_base 1..2: mod_base = OTHER; note = misc_feature - bicyclic nucleic acid scaffold modification
  source 1..22: mol_type = other RNA
agcttccagccattgtgttgaa

SEQ ID NO: 931 - RNA, 22 nt, synthetic construct
  misc_feature 1..22: note = Antisense oligonucleotide
  modified_base 21..22: mod_base = OTHER; note = misc_feature - bicyclic nucleic acid scaffold modification
  source 1..22: mol_type = other RNA
agcttccagccattgtgttgaa

SEQ ID NO: 932 - RNA, 20 nt, synthetic construct
  misc_feature 1..20: note = Antisense oligonucleotide
  source 1..20: mol_type = other RNA
agcttccagccattgtgttg

SEQ ID NO: 933 - RNA, 20 nt, synthetic construct
  misc_feature 1..20: note = Antisense oligonucleotide
  modified_base 1: mod_base = OTHER; note = misc_feature - bicyclic nucleic acid scaffold modification
  source 1..20: mol_type = other RNA
agcttccagccattgtgttg

SEQ ID NO: 934 - RNA, 20 nt, synthetic construct
  misc_feature 1..20: note = Antisense oligonucleotide
  modified_base 20: mod_base = OTHER; note = misc_feature - bicyclic nucleic acid scaffold modification
  source 1..20: mol_type = other RNA
agcttccagccattgtgttg

SEQ ID NO: 935 - RNA, 20 nt, synthetic construct
  misc_feature 1..20: note = Antisense oligonucleotide
  modified_base 1: mod_base = OTHER; note = misc_feature - bicyclic nucleic acid scaffold modification
  modified_base 20: mod_base = OTHER; note = misc_feature - bicyclic nucleic acid scaffold modification
  source 1..20: mol_type = other RNA
agcttccagccattgtgttg

SEQ ID NO: 936 - RNA, 20 nt, synthetic construct
  misc_feature 1..20: note = Antisense oligonucleotide
  modified_base 1..2: mod_base = OTHER; note = misc_feature - bicyclic nucleic acid scaffold modification
  source 1..20: mol_type = other RNA
agcttccagccattgtgttg

SEQ ID NO: 937 - RNA, 20 nt, synthetic construct
  modified_base 19: mod_base = OTHER; note = thymine
  misc_feature 1..20: note = Antisense oligonucleotide
  modified_base 19..20: mod_base = OTHER; note = misc_feature - bicyclic nucleic acid scaffold modification
  source 1..20: mol_type = other RNA
agcttccagccattgtgttg

SEQ ID NO: 938 - RNA, 18 nt, synthetic construct
  misc_feature 1..18: note = Antisense oligonucleotide
  source 1..18: mol_type = other RNA
agcttccagccattgtgt

SEQ ID NO: 939 - RNA, 18 nt, synthetic construct
  misc_feature 1..18: note = Antisense oligonucleotide
  modified_base 1: mod_base = OTHER; note = misc_feature - bicyclic nucleic acid scaffold modification
  source 1..18: mol_type = other RNA
agcttccagccattgtgt

SEQ ID NO: 940 - RNA, 18 nt, synthetic construct
  modified_base 18: mod_base = OTHER; note = thymine
  misc_feature 1..18: note = Antisense oligonucleotide
  modified_base 18: mod_base = OTHER; note = misc_feature - bicyclic nucleic acid scaffold modification
  source 1..18: mol_type = other RNA
agcttccagccattgtgt

SEQ ID NO: 941 - RNA, 18 nt, synthetic construct
  modified_base 18: mod_base = OTHER; note = thymine
  misc_feature 1..18: note = Antisense oligonucleotide
  modified_base 1: mod_base = OTHER; note = misc_feature - bicyclic nucleic acid scaffold modification
  modified_base 18: mod_base = OTHER; note = misc_feature - bicyclic nucleic acid scaffold modification
  source 1..18: mol_type = other RNA
agcttccagccattgtgt

SEQ ID NO: 942 - RNA, 18 nt, synthetic construct
  misc_feature 1..18: note = Antisense oligonucleotide
  modified_base 1..2: mod_base = OTHER; note = misc_feature - bicyclic nucleic acid scaffold modification
  source 1..18: mol_type = other RNA
agcttccagccattgtgt

SEQ ID NO: 943 - RNA, 18 nt, synthetic construct
  modified_base 18: mod_base = OTHER; note = thymine
  misc_feature 1..18: note = Antisense oligonucleotide
  modified_base 17..18: mod_base = OTHER; note = misc_feature - bicyclic nucleic acid scaffold modification
  source 1..18: mol_type = other RNA
agcttccagccattgtgt

SEQ ID NO: 944 - RNA, 16 nt, synthetic construct
  misc_feature 1..16: note = Antisense oligonucleotide
  source 1..16: mol_type = other RNA
agcttccagccattgt

SEQ ID NO: 945 - RNA, 16 nt, synthetic construct
  misc_feature 1..16: note = Antisense oligonucleotide
  modified_base 1: mod_base = OTHER; note = misc_feature - bicyclic nucleic acid scaffold modification
  source 1..16: mol_type = other RNA
agcttccagccattgt

SEQ ID NO: 946 - RNA, 16 nt, synthetic construct
  modified_base 16: mod_base = OTHER; note = thymine
  misc_feature 1..16: note = Antisense oligonucleotide
  modified_base 16: mod_base = OTHER; note = misc_feature - bicyclic nucleic acid scaffold modification
  source 1..16: mol_type = other RNA
agcttccagccattgt

SEQ ID NO: 947 - RNA, 16 nt, synthetic construct
  modified_base 16: mod_base = OTHER; note = thymine
  misc_feature 1..16: note = Antisense oligonucleotide
  modified_base 1: mod_base = OTHER; note = misc_feature - bicyclic nucleic acid scaffold modification
  modified_base 16: mod_base = OTHER; note = misc_feature - bicyclic nucleic acid scaffold modification
  source 1..16: mol_type = other RNA
agcttccagccattgt

SEQ ID NO: 948 - RNA, 16 nt, synthetic construct
  misc_feature 1..16: note = Antisense oligonucleotide
  modified_base 1..2: mod_base = OTHER; note = misc_feature - bicyclic nucleic acid scaffold modification
  source 1..16: mol_type = other RNA
agcttccagccattgt

SEQ ID NO: 949 - RNA, 16 nt, synthetic construct
  modified_base 16: mod_base = OTHER; note = thymine
  misc_feature 1..16: note = Antisense oligonucleotide
  modified_base 15..16: mod_base = OTHER; note = misc_feature - bicyclic nucleic acid scaffold modification
  source 1..16: mol_type = other RNA
agcttccagccattgt

SEQ ID NO: 950 - RNA, 22 nt, synthetic construct
  misc_feature 1..22: note = Antisense oligonucleotide
  source 1..22: mol_type = other RNA
ttccagccattgtgttgaatcc

SEQ ID NO: 951 - RNA, 22 nt, synthetic construct
  modified_base 1: mod_base = OTHER; note = thymine
  misc_feature 1..22: note = Antisense oligonucleotide
  modified_base 1: mod_base = OTHER; note = misc_feature - bicyclic nucleic acid scaffold modification
  source 1..22: mol_type = other RNA
ttccagccattgtgttgaatcc

SEQ ID NO: 952 - RNA, 22 nt, synthetic construct
  misc_feature 1..22: note = Antisense oligonucleotide
  modified_base 22: mod_base = OTHER; note = misc_feature - bicyclic nucleic acid scaffold modification
  source 1..22: mol_type = other RNA
ttccagccattgtgttgaatcc

SEQ ID NO: 953 - RNA, 22 nt, synthetic construct
  modified_base 1: mod_base = OTHER; note = thymine
  misc_feature 1..22: note = Antisense oligonucleotide
  modified_base 1: mod_base = OTHER; note = misc_feature - bicyclic nucleic acid scaffold modification
  modified_base 22: mod_base = OTHER; note = misc_feature - bicyclic nucleic acid scaffold modification
  source 1..22: mol_type = other RNA
ttccagccattgtgttgaatcc

SEQ ID NO: 954 - RNA, 22 nt, synthetic construct
  modified_base 1..2: mod_base = OTHER; note = thymine
  misc_feature 1..22: note = Antisense oligonucleotide
  modified_base 1..2: mod_base = OTHER; note = misc_feature - bicyclic nucleic acid scaffold modification
  source 1..22: mol_type = other RNA
ttccagccattgtgttgaatcc

SEQ ID NO: 955 - RNA, 22 nt, synthetic construct
  misc_feature 1..22: note = Antisense oligonucleotide
  modified_base 21..22: mod_base = OTHER; note = misc_feature - bicyclic nucleic acid scaffold modification
  source 1..22: mol_type = other RNA
ttccagccattgtgttgaatcc

SEQ ID NO: 956 - RNA, 20 nt, synthetic construct
  misc_feature 1..20: note = Antisense oligonucleotide
  source 1..20: mol_type = other RNA
ccagccattgtgttgaatcc

SEQ ID NO: 957 - RNA, 20 nt, synthetic construct
  misc_feature 1..20: note = Antisense oligonucleotide
  modified_base 1: mod_base = OTHER; note = misc_feature - bicyclic nucleic acid scaffold modification
  source 1..20: mol_type = other RNA
ccagccattgtgttgaatcc

SEQ ID NO: 958 - RNA, 20 nt, synthetic construct
  misc_feature 1..20: note = Antisense oligonucleotide
  modified_base 20: mod_base = OTHER; note = misc_feature - bicyclic nucleic acid scaffold modification
  source 1..20: mol_type = other RNA
ccagccattgtgttgaatcc

SEQ ID NO: 959 - RNA, 20 nt, synthetic construct
  misc_feature 1..20: note = Antisense oligonucleotide
  modified_base 1: mod_base = OTHER; note = misc_feature - bicyclic nucleic acid scaffold modification
  modified_base 20: mod_base = OTHER; note = misc_feature - bicyclic nucleic acid scaffold modification
  source 1..20: mol_type = other RNA
ccagccattgtgttgaatcc

SEQ ID NO: 960 - RNA, 20 nt, synthetic construct
  misc_feature 1..20: note = Antisense oligonucleotide
  modified_base 1..2: mod_base = OTHER; note = misc_feature - bicyclic nucleic acid scaffold modification
  source 1..20: mol_type = other RNA
ccagccattgtgttgaatcc

SEQ ID NO: 961 - RNA, 20 nt, synthetic construct
  misc_feature 1..20: note = Antisense oligonucleotide
  modified_base 19..20: mod_base = OTHER; note = misc_feature - bicyclic nucleic acid scaffold modification
  source 1..20: mol_type = other RNA
ccagccattgtgttgaatcc

SEQ ID NO: 962 - RNA, 18 nt, synthetic construct
  misc_feature 1..18: note = Antisense oligonucleotide
  source 1..18: mol_type = other RNA
agccattgtgttgaatcc

SEQ ID NO: 963 - RNA, 18 nt, synthetic construct
  misc_feature 1..18: note = Antisense oligonucleotide
  modified_base 1: mod_base = OTHER; note = misc_feature - bicyclic nucleic acid scaffold modification
  source 1..18: mol_type = other RNA
agccattgtgttgaatcc

SEQ ID NO: 964 - RNA, 18 nt, synthetic construct
  misc_feature 1..18: note = Antisense oligonucleotide
  modified_base 18: mod_base = OTHER; note = misc_feature - bicyclic nucleic acid scaffold modification
  source 1..18: mol_type = other RNA
agccattgtgttgaatcc

SEQ ID NO: 965 - RNA, 18 nt, synthetic construct
  misc_feature 1..18: note = Antisense oligonucleotide
  modified_base 1: mod_base = OTHER; note = misc_feature - bicyclic nucleic acid scaffold modification
  modified_base 18: mod_base = OTHER; note = misc_feature - bicyclic nucleic acid scaffold modification
  source 1..18: mol_type = other RNA
agccattgtgttgaatcc

SEQ ID NO: 966 - RNA, 18 nt, synthetic construct
  misc_feature 1..18: note = Antisense oligonucleotide
  modified_base 1..2: mod_base = OTHER; note = misc_feature - bicyclic nucleic acid scaffold modification
  source 1..18: mol_type = other RNA
agccattgtgttgaatcc

SEQ ID NO: 967 - RNA, 18 nt, synthetic construct
  misc_feature 1..18: note = Antisense oligonucleotide
  modified_base 17..18: mod_base = OTHER; note = misc_feature - bicyclic nucleic acid scaffold modification
  source 1..18: mol_type = other RNA
agccattgtgttgaatcc

SEQ ID NO: 968 - RNA, 16 nt, synthetic construct
  misc_feature 1..16: note = Antisense oligonucleotide
  source 1..16: mol_type = other RNA
ccattgtgttgaatcc

SEQ ID NO: 969 - RNA, 16 nt, synthetic construct
  misc_feature 1..16: note = Antisense oligonucleotide
  modified_base 1: mod_base = OTHER; note = misc_feature - bicyclic nucleic acid scaffold modification
  source 1..16: mol_type = other RNA
ccattgtgttgaatcc

SEQ ID NO: 970 - RNA, 16 nt, synthetic construct
  misc_feature 1..16: note = Antisense oligonucleotide
  modified_base 16: mod_base = OTHER; note = misc_feature - bicyclic nucleic acid scaffold modification
  source 1..16: mol_type = other RNA
ccattgtgttgaatcc

SEQ ID NO: 971 - RNA, 16 nt, synthetic construct
  misc_feature 1..16: note = Antisense oligonucleotide
  modified_base 1: mod_base = OTHER; note = misc_feature - bicyclic nucleic acid scaffold modification
  modified_base 16: mod_base = OTHER; note = misc_feature - bicyclic nucleic acid scaffold modification
  source 1..16: mol_type = other RNA
ccattgtgttgaatcc

SEQ ID NO: 972 - RNA, 16 nt, synthetic construct
  misc_feature 1..16: note = Antisense oligonucleotide
  modified_base 1..2: mod_base = OTHER; note = misc_feature - bicyclic nucleic acid scaffold modification
  source 1..16: mol_type = other RNA
ccattgtgttgaatcc

SEQ ID NO: 973 - RNA, 16 nt, synthetic construct
  misc_feature 1..16: note = Antisense oligonucleotide
  modified_base 15..16: mod_base = OTHER; note = misc_feature - bicyclic nucleic acid scaffold modification
  source 1..16: mol_type = other RNA
ccattgtgttgaatcc

SEQ ID NO: 974 - RNA, 18 nt, synthetic construct
  misc_feature 1..18: note = Antisense oligonucleotide
  source 1..18: mol_type = other RNA
tccagccattgtgttgaa

SEQ ID NO: 975 - RNA, 18 nt, synthetic construct
  modified_base 1: mod_base = OTHER; note = thymine
  misc_feature 1..18: note = Antisense oligonucleotide
  modified_base 1: mod_base = OTHER; note = misc_feature - bicyclic nucleic acid scaffold modification
  source 1..18: mol_type = other RNA
tccagccattgtgttgaa

SEQ ID NO: 976 - RNA, 18 nt, synthetic construct
  misc_feature 1..18: note = Antisense oligonucleotide
  modified_base 18: mod_base = OTHER; note = misc_feature - bicyclic nucleic acid scaffold modification
  source 1..18: mol_type = other RNA
tccagccattgtgttgaa

SEQ ID NO: 977 - RNA, 18 nt, synthetic construct
  modified_base 1: mod_base = OTHER; note = thymine
  misc_feature 1..18: note = Antisense oligonucleotide
  modified_base 1: mod_base = OTHER; note = misc_feature - bicyclic nucleic acid scaffold modification
  modified_base 18: mod_base = OTHER; note = misc_feature - bicyclic nucleic acid scaffold modification
  source 1..18: mol_type = other RNA
tccagccattgtgttgaa

SEQ ID NO: 978 - RNA, 18 nt, synthetic construct
  modified_base 1: mod_base = OTHER; note = thymine
  misc_feature 1..18: note = Antisense oligonucleotide
  modified_base 1..2: mod_base = OTHER; note = misc_feature - bicyclic nucleic acid scaffold modification
  source 1..18: mol_type = other RNA
tccagccattgtgttgaa

SEQ ID NO: 979 - RNA, 18 nt, synthetic construct
  misc_feature 1..18: note = Antisense oligonucleotide
  modified_base 17..18: mod_base = OTHER; note = misc_feature - bicyclic nucleic acid scaffold modification
  source 1..18: mol_type = other RNA
tccagccattgtgttgaa

SEQ ID NO: 980 - RNA, 22 nt, synthetic construct
  misc_feature 1..22: note = Antisense oligonucleotide
  source 1..22: mol_type = other RNA
cctaagacctgctcagcttctt

SEQ ID NO: 981 - RNA, 22 nt, synthetic construct
  misc_feature 1..22: note = Antisense oligonucleotide
  modified_base 1: mod_base = OTHER; note = misc_feature - bicyclic nucleic acid scaffold modification
  source 1..22: mol_type = other RNA
cctaagacctgctcagcttctt

SEQ ID NO: 982 - RNA, 22 nt, synthetic construct
  modified_base 22: mod_base = OTHER; note = thymine
  misc_feature 1..22: note = Antisense oligonucleotide
  modified_base 22: mod_base = OTHER; note = misc_feature - bicyclic nucleic acid scaffold modification
  source 1..22: mol_type = other RNA
cctaagacctgctcagcttctt

SEQ ID NO: 983 - RNA, 22 nt, synthetic construct
  modified_base 22: mod_base = OTHER; note = thymine
  misc_feature 1..22: note = Antisense oligonucleotide
  modified_base 1: mod_base = OTHER; note = misc_feature - bicyclic nucleic acid scaffold modification
  modified_base 22: mod_base = OTHER; note = misc_feature - bicyclic nucleic acid scaffold modification
  source 1..22: mol_type = other RNA
cctaagacctgctcagcttctt

SEQ ID NO: 984 - RNA, 22 nt, synthetic construct
  misc_feature 1..22: note = Antisense oligonucleotide
  modified_base 1..2: mod_base = OTHER; note = misc_feature - bicyclic nucleic acid scaffold modification
  source 1..22: mol_type = other RNA
cctaagacctgctcagcttctt

SEQ ID NO: 985 - RNA, 22 nt, synthetic construct
  modified_base 21..22: mod_base = OTHER; note = thymine
  misc_feature 1..22: note = Antisense oligonucleotide
  modified_base 21..22: mod_base = OTHER; note = misc_feature - bicyclic nucleic acid scaffold modification
  source 1..22: mol_type = other RNA
cctaagacctgctcagcttctt

SEQ ID NO: 986 - RNA, 20 nt, synthetic construct
  misc_feature 1..20: note = Antisense oligonucleotide
  source 1..20: mol_type = other RNA
cctaagacctgctcagcttc

SEQ ID NO: 987 - RNA, 20 nt, synthetic construct
  misc_feature 1..20: note = Antisense oligonucleotide
  modified_base 1: mod_base = OTHER; note = misc_feature - bicyclic nucleic acid scaffold modification
  source 1..20: mol_type = other RNA
cctaagacctgctcagcttc

SEQ ID NO: 988 - RNA, 20 nt, synthetic construct
  misc_feature 1..20: note = Antisense oligonucleotide
  modified_base 20: mod_base = OTHER; note = misc_feature - bicyclic nucleic acid scaffold modification
  source 1..20: mol_type = other RNA
cctaagacctgctcagcttc

SEQ ID NO: 989 - RNA, 20 nt, synthetic construct
  misc_feature 1..20: note = Antisense oligonucleotide
  modified_base 1: mod_base = OTHER; note = misc_feature - bicyclic nucleic acid scaffold modification
  modified_base 20: mod_base = OTHER; note = misc_feature - bicyclic nucleic acid scaffold modification
  source 1..20: mol_type = other RNA
cctaagacctgctcagcttc

SEQ ID NO: 990 - RNA, 20 nt, synthetic construct
  misc_feature 1..20: note = Antisense oligonucleotide
  modified_base 1..2: mod_base = OTHER; note = misc_feature - bicyclic nucleic acid scaffold modification
  source 1..20: mol_type = other RNA
cctaagacctgctcagcttc

SEQ ID NO: 991 - RNA, 20 nt, synthetic construct
  modified_base 19: mod_base = OTHER; note = thymine
  misc_feature 1..20: note = Antisense oligonucleotide
  modified_base 19..20: mod_base = OTHER; note = misc_feature - bicyclic nucleic acid scaffold modification
  source 1..20: mol_type = other RNA
cctaagacctgctcagcttc

SEQ ID NO: 992 - RNA, 18 nt, synthetic construct
  misc_feature 1..18: note = Antisense oligonucleotide
  source 1..18: mol_type = other RNA
cctaagacctgctcagct

SEQ ID NO: 993 - RNA, 18 nt, synthetic construct
  misc_feature 1..18: note = Antisense oligonucleotide
  modified_base 1: mod_base = OTHER; note = misc_feature - bicyclic nucleic acid scaffold modification
  source 1..18: mol_type = other RNA
cctaagacctgctcagct

SEQ ID NO: 994 - RNA, 18 nt, synthetic construct
  modified_base 18: mod_base = OTHER; note = thymine
  misc_feature 1..18: note = Antisense oligonucleotide
  modified_base 18: mod_base = OTHER; note = misc_feature - bicyclic nucleic acid scaffold modification
  source 1..18: mol_type = other RNA
cctaagacctgctcagct

SEQ ID NO: 995 - RNA, 18 nt, synthetic construct
  modified_base 18: mod_base = OTHER; note = thymine
  misc_feature 1..18: note = Antisense oligonucleotide
  modified_base 1: mod_base = OTHER; note = misc_feature - bicyclic nucleic acid scaffold modification
  modified_base 18: mod_base = OTHER; note = misc_feature - bicyclic nucleic acid scaffold modification
  source 1..18: mol_type = other RNA
cctaagacctgctcagct

SEQ ID NO: 996 - RNA, 18 nt, synthetic construct
  misc_feature 1..18: note = Antisense oligonucleotide
  modified_base 1..2: mod_base = OTHER; note = misc_feature - bicyclic nucleic acid scaffold modification
  source 1..18: mol_type = other RNA
cctaagacctgctcagct

SEQ ID NO: 997 - RNA, 18 nt, synthetic construct
  modified_base 18: mod_base = OTHER; note = thymine
  misc_feature 1..18: note = Antisense oligonucleotide
  modified_base 17..18: mod_base = OTHER; note = misc_feature - bicyclic nucleic acid scaffold modification
  source 1..18: mol_type = other RNA
cctaagacctgctcagct

SEQ ID NO: 998 - RNA, 16 nt, synthetic construct
  misc_feature 1..16: note = Antisense oligonucleotide
  source 1..16: mol_type = other RNA
cctaagacctgctcag

SEQ ID NO: 999 - RNA, 16 nt, synthetic construct
  misc_feature 1..16: note = Antisense oligonucleotide
  modified_base 1: mod_base = OTHER; note = misc_feature - bicyclic nucleic acid scaffold modification
  source 1..16: mol_type = other RNA
cctaagacctgctcag

SEQ ID NO: 1000 - RNA, 16 nt, synthetic construct
  misc_feature 1..16: note = Antisense oligonucleotide
  modified_base 16: mod_base = OTHER; note = misc_feature - bicyclic nucleic acid scaffold modification
  source 1..16: mol_type = other RNA
cctaagacctgctcag

SEQ ID NO: 1001 - RNA, 16 nt, synthetic construct
  misc_feature 1..16: note = Antisense oligonucleotide
  modified_base 1: mod_base = OTHER; note = misc_feature - bicyclic nucleic acid scaffold modification
  modified_base 16: mod_base = OTHER; note = misc_feature - bicyclic nucleic acid scaffold modification
  source 1..16: mol_type = other RNA
cctaagacctgctcag

SEQ ID NO: 1002 - RNA, 16 nt, synthetic construct
  misc_feature 1..16: note = Antisense oligonucleotide
  modified_base 1..2: mod_base = OTHER; note = misc_feature - bicyclic nucleic acid scaffold modification
  source 1..16: mol_type = other RNA
cctaagacctgctcag

SEQ ID NO: 1003 - RNA, 16 nt, synthetic construct
  misc_feature 1..16: note = Antisense oligonucleotide
  modified_base 15..16: mod_base = OTHER; note = misc_feature - bicyclic nucleic acid scaffold modification
  source 1..16: mol_type = other RNA
cctaagacctgctcag

SEQ ID NO: 1004 - RNA, 20 nt, synthetic construct
  misc_feature 1..20: note = Antisense oligonucleotide
  source 1..20: mol_type = other RNA
taagacctgctcagcttctt

SEQ ID NO: 1005 - RNA, 20 nt, synthetic construct
  modified_base 1: mod_base = OTHER; note = thymine
  misc_feature 1..20: note = Antisense oligonucleotide
  modified_base 1: mod_base = OTHER; note = misc_feature - bicyclic nucleic acid scaffold modification
  source 1..20: mol_type = other RNA
taagacctgctcagcttctt

SEQ ID NO: 1006 - RNA, 20 nt, synthetic construct
  modified_base 20: mod_base = OTHER; note = thymine
  misc_feature 1..20: note = Antisense oligonucleotide
  modified_base 20: mod_base = OTHER; note = misc_feature - bicyclic nucleic acid scaffold modification
  source 1..20: mol_type = other RNA
taagacctgctcagcttctt

SEQ ID NO: 1007 - RNA, 20 nt, synthetic construct
  modified_base 1: mod_base = OTHER; note = thymine
  modified_base 20: mod_base = OTHER; note = thymine
  misc_feature 1..20: note = Antisense oligonucleotide
  modified_base 1: mod_base = OTHER; note = misc_feature - bicyclic nucleic acid scaffold modification
  modified_base 20: mod_base = OTHER; note = misc_feature - bicyclic nucleic acid scaffold modification
  source 1..20: mol_type = other RNA
taagacctgctcagcttctt

SEQ ID NO: 1008 - RNA, 20 nt, synthetic construct
  modified_base 1: mod_base = OTHER; note = thymine
  misc_feature 1..20: note = Antisense oligonucleotide
  modified_base 1..2: mod_base = OTHER; note = misc_feature - bicyclic nucleic acid scaffold modification
  source 1..20: mol_type = other RNA
taagacctgctcagcttctt

SEQ ID NO: 1009 - RNA, 20 nt, synthetic construct
  modified_base 19..20: mod_base = OTHER; note = thymine
  misc_feature 1..20: note = Antisense oligonucleotide
  modified_base 19..20: mod_base = OTHER; note = misc_feature - bicyclic nucleic acid scaffold modification
  source 1..20: mol_type = other RNA
taagacctgctcagcttctt

SEQ ID NO: 1010 - RNA, 18 nt, synthetic construct
  misc_feature 1..18: note = Antisense oligonucleotide
  source 1..18: mol_type = other RNA
agacctgctcagcttctt

SEQ ID NO: 1011 - RNA, 18 nt, synthetic construct
  misc_feature 1..18: note = Antisense oligonucleotide
  modified_base 1: mod_base = OTHER; note = misc_feature - bicyclic nucleic acid scaffold modification
  source 1..18: mol_type = other RNA
agacctgctcagcttctt

SEQ ID NO: 1012 - RNA, 18 nt, synthetic construct
  modified_base 18: mod_base = OTHER; note = thymine
  misc_feature 1..18: note = Antisense oligonucleotide
  modified_base 18: mod_base = OTHER; note = misc_feature - bicyclic nucleic acid scaffold modification
  source 1..18: mol_type = other RNA
agacctgctcagcttctt

SEQ ID NO: 1013 - RNA, 18 nt, synthetic construct
  modified_base 18: mod_base = OTHER; note = thymine
  misc_feature 1..18: note = Antisense oligonucleotide
  modified_base 1: mod_base = OTHER; note = misc_feature - bicyclic nucleic acid scaffold modification
  modified_base 18: mod_base = OTHER; note = misc_feature - bicyclic nucleic acid scaffold modification
  source 1..18: mol_type = other RNA
agacctgctcagcttctt

SEQ ID NO: 1014 - RNA, 18 nt, synthetic construct
  misc_feature 1..18: note = Antisense oligonucleotide
  modified_base 1..2: mod_base = OTHER; note = misc_feature - bicyclic nucleic acid scaffold modification
  source 1..18: mol_type = other RNA
agacctgctcagcttctt

SEQ ID NO: 1015 - RNA, 18 nt, synthetic construct
  modified_base 17..18: mod_base = OTHER; note = thymine
  misc_feature 1..18: note = Antisense oligonucleotide
  modified_base 17..18: mod_base = OTHER; note = misc_feature - bicyclic nucleic acid scaffold modification
  source 1..18: mol_type = other RNA
agacctgctcagcttctt

SEQ ID NO: 1016 - RNA, 16 nt, synthetic construct
  misc_feature 1..16: note = Antisense oligonucleotide
  source 1..16: mol_type = other RNA
acctgctcagcttctt

SEQ ID NO: 1017 - RNA, 16 nt, synthetic construct
  misc_feature 1..16: note = Antisense oligonucleotide
  modified_base 1: mod_base = OTHER; note = misc_feature - bicyclic nucleic acid scaffold modification
  source 1..16: mol_type = other RNA
acctgctcagcttctt

SEQ ID NO: 1018 - RNA, 16 nt, synthetic construct
  modified_base 16: mod_base = OTHER; note = thymine
  misc_feature 1..16: note = Antisense oligonucleotide
  modified_base 16: mod_base = OTHER; note = misc_feature - bicyclic nucleic acid scaffold modification
  source 1..16: mol_type = other RNA
acctgctcagcttctt

SEQ ID NO: 1019 - RNA, 16 nt, synthetic construct
  modified_base 16: mod_base = OTHER; note = thymine
  misc_feature 1..16: note = Antisense oligonucleotide
  modified_base 1: mod_base = OTHER; note = misc_feature - bicyclic nucleic acid scaffold modification
  modified_base 16: mod_base = OTHER; note = misc_feature - bicyclic nucleic acid scaffold modification
  source 1..16: mol_type = other RNA
acctgctcagcttctt

SEQ ID NO: 1020 - RNA, 16 nt, synthetic construct
  misc_feature 1..16: note = Antisense oligonucleotide
  modified_base 1..2: mod_base = OTHER; note = misc_feature - bicyclic nucleic acid scaffold modification
  source 1..16: mol_type = other RNA
acctgctcagcttctt

SEQ ID NO: 1021 - RNA, 16 nt, synthetic construct
  modified_base 15..16: mod_base = OTHER; note = thymine
  misc_feature 1..16: note = Antisense oligonucleotide
  modified_base 15..16: mod_base = OTHER; note = misc_feature - bicyclic nucleic acid scaffold modification
  source 1..16: mol_type = other RNA
acctgctcagcttctt

SEQ ID NO: 1022 - RNA, 18 nt, synthetic construct
  misc_feature 1..18: note = Antisense oligonucleotide
  source 1..18: mol_type = other RNA
taagacctgctcagcttc

SEQ ID NO: 1023 - RNA, 18 nt, synthetic construct
  modified_base 1: mod_base = OTHER; note = thymine
  misc_feature 1..18: note = Antisense oligonucleotide
  modified_base 1: mod_base = OTHER; note = misc_feature - bicyclic nucleic acid scaffold modification
  source 1..18: mol_type = other RNA
taagacctgctcagcttc

SEQ ID NO: 1024 - RNA, 18 nt, synthetic construct
  misc_feature 1..18: note = Antisense oligonucleotide
  modified_base 18: mod_base = OTHER; note = misc_feature - bicyclic nucleic acid scaffold modification
  source 1..18: mol_type = other RNA
taagacctgctcagcttc

SEQ ID NO: 1025 - RNA, 18 nt, synthetic construct
  modified_base 1: mod_base = OTHER; note = thymine
  misc_feature 1..18: note = Antisense oligonucleotide
  modified_base 1: mod_base = OTHER; note = misc_feature - bicyclic nucleic acid scaffold modification
  modified_base 18: mod_base = OTHER; note = misc_feature - bicyclic nucleic acid scaffold modification
  source 1..18: mol_type = other RNA
taagacctgctcagcttc

SEQ ID NO: 1026 - RNA, 18 nt, synthetic construct
  modified_base 1: mod_base = OTHER; note = thymine
  misc_feature 1..18: note = Antisense oligonucleotide
  modified_base 1..2: mod_base = OTHER; note = misc_feature - bicyclic nucleic acid scaffold modification
  source 1..18: mol_type = other RNA
taagacctgctcagcttc

SEQ ID NO: 1027 - RNA, 18 nt, synthetic construct
  modified_base 17: mod_base = OTHER; note = thymine
  misc_feature 1..18: note = Antisense oligonucleotide
  modified_base 17..18: mod_base = OTHER; note = misc_feature - bicyclic nucleic acid scaffold modification
  source 1..18: mol_type = other RNA
taagacctgctcagcttc

SEQ ID NO: 1028 - RNA, 22 nt, synthetic construct
  misc_feature 1..22: note = Antisense oligonucleotide
  source 1..22: mol_type = other RNA
gacctgctcagcttcttcctta

SEQ ID NO: 1029 - RNA, 22 nt, synthetic construct
  misc_feature 1..22: note = Antisense oligonucleotide
  modified_base 1: mod_base = OTHER; note = misc_feature - bicyclic nucleic acid scaffold modification
  source 1..22: mol_type = other RNA
gacctgctcagcttcttcctta

SEQ ID NO: 1030 - RNA, 22 nt, synthetic construct
  misc_feature 1..22: note = Antisense oligonucleotide
  modified_base 22: mod_base = OTHER; note = misc_feature - bicyclic nucleic acid scaffold modification
  source 1..22: mol_type = other RNA
gacctgctcagcttcttcctta

SEQ ID NO: 1031 - RNA, 22 nt, synthetic construct
  misc_feature 1..22: note = Antisense oligonucleotide
  modified_base 1: mod_base = OTHER; note = misc_feature - bicyclic nucleic acid scaffold modification
  modified_base 22: mod_base = OTHER; note = misc_feature - bicyclic nucleic acid scaffold modification
  source 1..22: mol_type = other RNA
gacctgctcagcttcttcctta

SEQ ID NO: 1032 - RNA, 22 nt, synthetic construct
  misc_feature 1..22: note = Antisense oligonucleotide
  modified_base 1..2: mod_base = OTHER; note = misc_feature - bicyclic nucleic acid scaffold modification
  source 1..22: mol_type = other RNA
gacctgctcagcttcttcctta

SEQ ID NO: 1033 - RNA, 22 nt, synthetic construct
  modified_base 21: mod_base = OTHER; note = thymine
  misc_feature 1..22: note = Antisense oligonucleotide
  modified_base 21..22: mod_base = OTHER; note = misc_feature - bicyclic nucleic acid scaffold modification
  source 1..22: mol_type = other RNA
gacctgctcagcttcttcctta

SEQ ID NO: 1034 - RNA, 20 nt, synthetic construct
  misc_feature 1..20: note = Antisense oligonucleotide
  source 1..20: mol_type = other RNA
gacctgctcagcttcttcct

SEQ ID NO: 1035 - RNA, 20 nt, synthetic construct
  misc_feature 1..20: note = Antisense oligonucleotide
  modified_base 1: mod_base = OTHER; note = misc_feature - bicyclic nucleic acid scaffold modification
  source 1..20: mol_type = other RNA
gacctgctcagcttcttcct

SEQ ID NO: 1036 - RNA, 20 nt, synthetic construct
  modified_base 20: mod_base = OTHER; note = thymine
  misc_feature 1..20: note = Antisense oligonucleotide
  modified_base 20: mod_base = OTHER; note = misc_feature - bicyclic nucleic acid scaffold modification
  source 1..20: mol_type = other RNA
gacctgctcagcttcttcct

SEQ ID NO: 1037 - RNA, 20 nt, synthetic construct
  modified_base 20: mod_base = OTHER; note = thymine
  misc_feature 1..20: note = Antisense oligonucleotide
  modified_base 1: mod_base = OTHER; note = misc_feature - bicyclic nucleic acid scaffold modification
  modified_base 20: mod_base = OTHER; note = misc_feature - bicyclic nucleic acid scaffold modification
  source 1..20: mol_type = other RNA
gacctgctcagcttcttcct

SEQ ID NO: 1038 - RNA, 20 nt, synthetic construct
  misc_feature 1..20: note = Antisense oligonucleotide
  modified_base 1..2: mod_base = OTHER; note = misc_feature - bicyclic nucleic acid scaffold modification
  source 1..20: mol_type = other RNA
gacctgctcagcttcttcct

SEQ ID NO: 1039 - RNA, 20 nt, synthetic construct
  modified_base 20: mod_base = OTHER; note = thymine
  misc_feature 1..20: note = Antisense oligonucleotide
  modified_base 19..20: mod_base = OTHER; note = misc_feature - bicyclic nucleic acid scaffold modification
  source 1..20: mol_type = other RNA
gacctgctcagcttcttcct

SEQ ID NO: 1040 - RNA, 18 nt, synthetic construct
  misc_feature 1..18: note = Antisense oligonucleotide
  source 1..18: mol_type = other RNA
gacctgctcagcttcttc

SEQ ID NO: 1041 - RNA, 18 nt, synthetic construct
  misc_feature 1..18: note = Antisense oligonucleotide
  modified_base 1: mod_base = OTHER; note = misc_feature - bicyclic nucleic acid scaffold modification
  source 1..18: mol_type = other RNA
gacctgctcagcttcttc

SEQ ID NO: 1042 - RNA, 18 nt, synthetic construct
  misc_feature 1..18: note = Antisense oligonucleotide
  modified_base 18: mod_base = OTHER; note = misc_feature - bicyclic nucleic acid scaffold modification
  source 1..18: mol_type = other RNA
gacctgctcagcttcttc

SEQ ID NO: 1043 - RNA, 18 nt, synthetic construct
  misc_feature 1..18: note = Antisense oligonucleotide
  modified_base 1: mod_base = OTHER; note = misc_feature - bicyclic nucleic acid scaffold modification
  modified_base 18: mod_base = OTHER; note = misc_feature - bicyclic nucleic acid scaffold modification
  source 1..18: mol_type = other RNA
gacctgctcagcttcttc

SEQ ID NO: 1044 - RNA, 18 nt, synthetic construct
  misc_feature 1..18: note = Antisense oligonucleotide
  modified_base 1..2: mod_base = OTHER; note = misc_feature - bicyclic nucleic acid scaffold modification
  source 1..18: mol_type = other RNA
gacctgctcagcttcttc

SEQ ID NO: 1045 - RNA, 18 nt, synthetic construct
  modified_base 17: mod_base = OTHER; note = thymine
  misc_feature 1..18: note = Antisense oligonucleotide
  modified_base 17..18: mod_base = OTHER; note = misc_feature - bicyclic nucleic acid scaffold modification
  source 1..18: mol_type = other RNA
gacctgctcagcttcttc

SEQ ID NO: 1046 - RNA, 16 nt, synthetic construct
  misc_feature 1..16: note = Antisense oligonucleotide
  source 1..16: mol_type = other RNA
gacctgctcagcttct

SEQ ID NO: 1047 - RNA, 16 nt, synthetic construct
  misc_feature 1..16: note = Antisense oligonucleotide
  modified_base 1: mod_base = OTHER; note = misc_feature - bicyclic nucleic acid scaffold modification
  source 1..16: mol_type = other RNA
gacctgctcagcttct

SEQ ID NO: 1048 - RNA, 16 nt, synthetic construct
  modified_base 16: mod_base = OTHER; note = thymine
  misc_feature 1..16: note = Antisense oligonucleotide
  modified_base 16: mod_base = OTHER; note = misc_feature - bicyclic nucleic acid scaffold modification
  source 1..16: mol_type = other RNA
gacctgctcagcttct

SEQ ID NO: 1049 - RNA, 16 nt, synthetic construct
  modified_base 16: mod_base = OTHER; note = thymine
  misc_feature 1..16: note = Antisense oligonucleotide
  modified_base 1: mod_base = OTHER; note = misc_feature - bicyclic nucleic acid scaffold modification
  modified_base 16: mod_base = OTHER; note = misc_feature - bicyclic nucleic acid scaffold modification
  source 1..16: mol_type = other RNA
gacctgctcagcttct

SEQ ID NO: 1050 - RNA, 16 nt, synthetic construct
  misc_feature 1..16: note = Antisense oligonucleotide
  modified_base 1..2: mod_base = OTHER; note = misc_feature - bicyclic nucleic acid scaffold modification
  source 1..16: mol_type = other RNA
gacctgctcagcttct

SEQ ID NO: 1051 - RNA, 16 nt, synthetic construct
  modified_base 16: mod_base = OTHER; note = thymine
  misc_feature 1..16: note = Antisense oligonucleotide
  modified_base 15..16: mod_base = OTHER; note = misc_feature - bicyclic nucleic acid scaffold modification
  source 1..16: mol_type = other RNA
gacctgctcagcttct

SEQ ID NO: 1052 - RNA, 20 nt, synthetic construct
  misc_feature 1..20: note = Antisense oligonucleotide
  source 1..20: mol_type = other RNA
cctgctcagcttcttcctta

SEQ ID NO: 1053 - RNA, 20 nt, synthetic construct
  misc_feature 1..20: note = Antisense oligonucleotide
  modified_base 1: mod_base = OTHER; note = misc_feature - bicyclic nucleic acid scaffold modification
  source 1..20: mol_type = other RNA
cctgctcagcttcttcctta

SEQ ID NO: 1054 - RNA, 20 nt, synthetic construct
  misc_feature 1..20: note = Antisense oligonucleotide
  modified_base 20: mod_base = OTHER; note = misc_feature - bicyclic nucleic acid scaffold modification
  source 1..20: mol_type = other RNA
cctgctcagcttcttcctta

SEQ ID NO: 1055 - RNA, 20 nt, synthetic construct
  misc_feature 1..20: note = Antisense oligonucleotide
  modified_base 1: mod_base = OTHER; note = misc_feature - bicyclic nucleic acid scaffold modification
  modified_base 20: mod_base = OTHER; note = misc_feature - bicyclic nucleic acid scaffold modification
  source 1..20: mol_type = other RNA
cctgctcagcttcttcctta

SEQ ID NO: 1056 - RNA, 20 nt, synthetic construct
  misc_feature 1..20: note = Antisense oligonucleotide
  modified_base 1..2: mod_base = OTHER; note = misc_feature - bicyclic nucleic acid scaffold modification
  source 1..20: mol_type = other RNA
cctgctcagcttcttcctta

SEQ ID NO: 1057 - RNA, 20 nt, synthetic construct
  modified_base 19: mod_base = OTHER; note = thymine
  misc_feature 1..20: note = Antisense oligonucleotide
  modified_base 19..20: mod_base = OTHER; note = misc_feature - bicyclic nucleic acid scaffold modification
  source 1..20: mol_type = other RNA
cctgctcagcttcttcctta

SEQ ID NO: 1058 - RNA, 18 nt, synthetic construct
  misc_feature 1..18: note = Antisense oligonucleotide
  source 1..18: mol_type = other RNA
tgctcagcttcttcctta

SEQ ID NO: 1059 - RNA, 18 nt, synthetic construct
  modified_base 1: mod_base = OTHER; note = thymine
  misc_feature 1..18: note = Antisense oligonucleotide
  modified_base 1: mod_base = OTHER; note = misc_feature - bicyclic nucleic acid scaffold modification
  source 1..18: mol_type = other RNA
tgctcagcttcttcctta

SEQ ID NO: 1060 - RNA, 18 nt, synthetic construct
  misc_feature 1..18: note = Antisense oligonucleotide
  modified_base 18: mod_base = OTHER; note = misc_feature - bicyclic nucleic acid scaffold modification
  source 1..18: mol_type = other RNA
tgctcagcttcttcctta

SEQ ID NO: 1061 - RNA, 18 nt, synthetic construct
  modified_base 1: mod_base = OTHER; note = thymine
  misc_feature 1..18: note = Antisense oligonucleotide
  modified_base 1: mod_base = OTHER; note = misc_feature - bicyclic nucleic acid scaffold modification
  modified_base 18: mod_base = OTHER; note = misc_feature - bicyclic nucleic acid scaffold modification
  source 1..18: mol_type = other RNA
tgctcagcttcttcctta

SEQ ID NO: 1062 - RNA, 18 nt, synthetic construct
  modified_base 1: mod_base = OTHER; note = thymine
  misc_feature 1..18: note = Antisense oligonucleotide
  modified_base 1..2: mod_base = OTHER; note = misc_feature - bicyclic nucleic acid scaffold modification
  source 1..18: mol_type = other RNA
tgctcagcttcttcctta

SEQ ID NO: 1063 - RNA, 18 nt, synthetic construct
  modified_base 17: mod_base = OTHER; note = thymine
  misc_feature 1..18: note = Antisense oligonucleotide
  modified_base 17..18: mod_base = OTHER; note = misc_feature - bicyclic nucleic acid scaffold modification
  source 1..18: mol_type = other RNA
tgctcagcttcttcctta

SEQ ID NO: 1064 - RNA, 16 nt, synthetic construct
  misc_feature 1..16: note = Antisense oligonucleotide
  source 1..16: mol_type = other RNA
ctcagcttcttcctta

SEQ ID NO: 1065 - RNA, 16 nt, synthetic construct
  misc_feature 1..16: note = Antisense oligonucleotide
  modified_base 1: mod_base = OTHER; note = misc_feature - bicyclic nucleic acid scaffold modification
  source 1..16: mol_type = other RNA
ctcagcttcttcctta

SEQ ID NO: 1066 - RNA, 16 nt, synthetic construct
  misc_feature 1..16: note = Antisense oligonucleotide
  modified_base 16: mod_base = OTHER; note = misc_feature - bicyclic nucleic acid scaffold modification
  source 1..16: mol_type = other RNA
ctcagcttcttcctta

SEQ ID NO: 1067 - RNA, 16 nt, synthetic construct
  misc_feature 1..16: note = Antisense oligonucleotide
  modified_base 1: mod_base = OTHER; note = misc_feature - bicyclic nucleic acid scaffold modification
  modified_base 16: mod_base = OTHER; note = misc_feature - bicyclic nucleic acid scaffold modification
  source 1..16: mol_type = other RNA
ctcagcttcttcctta

SEQ ID NO: 1068 - RNA, 16 nt, synthetic construct
  modified_base 2: mod_base = OTHER; note = thymine
  misc_feature 1..16: note = Antisense oligonucleotide
  modified_base 1..2: mod_base = OTHER; note = misc_feature - bicyclic nucleic acid scaffold modification
  source 1..16: mol_type = other RNA
ctcagcttcttcctta

SEQ ID NO: 1069 - RNA, 16 nt, synthetic construct
  modified_base 15: mod_base = OTHER; note = thymine
  misc_feature 1..16: note = Antisense oligonucleotide
  modified_base 15..16: mod_base = OTHER; note = misc_feature - bicyclic nucleic acid scaffold modification
  source 1..16: mol_type = other RNA
ctcagcttcttcctta

SEQ ID NO: 1070 - RNA, 18 nt, synthetic construct
  misc_feature 1..18: note = Antisense oligonucleotide
  source 1..18: mol_type = other RNA
cctgctcagcttcttcct

SEQ ID NO: 1071 - RNA, 18 nt, synthetic construct
  misc_feature 1..18: note = Antisense oligonucleotide
  modified_base 1: mod_base = OTHER; note = misc_feature - bicyclic nucleic acid scaffold modification
  source 1..18: mol_type = other RNA
cctgctcagcttcttcct

SEQ ID NO: 1072 - RNA, 18 nt, synthetic construct
  modified_base 18: mod_base = OTHER; note = thymine
  misc_feature 1..18: note = Antisense oligonucleotide
  modified_base 18: mod_base = OTHER; note = misc_feature - bicyclic nucleic acid scaffold modification
  source 1..18: mol_type = other RNA
cctgctcagcttcttcct

SEQ ID NO: 1073 - RNA, 18 nt, synthetic construct
  modified_base 18: mod_base = OTHER; note = thymine
  misc_feature 1..18: note = Antisense oligonucleotide
  modified_base 1: mod_base = OTHER; note = misc_feature - bicyclic nucleic acid scaffold modification
  modified_base 18: mod_base = OTHER; note = misc_feature - bicyclic nucleic acid scaffold modification
  source 1..18: mol_type = other RNA
cctgctcagcttcttcct

SEQ ID NO: 1074 - RNA, 18 nt, synthetic construct
  misc_feature 1..18: note = Antisense oligonucleotide
  modified_base 1..2: mod_base = OTHER; note = misc_feature - bicyclic nucleic acid scaffold modification
  source 1..18: mol_type = other RNA
cctgctcagcttcttcct

SEQ ID NO: 1075 - RNA, 18 nt, synthetic construct
  modified_base 18: mod_base = OTHER; note = thymine
  misc_feature 1..18: note = Antisense oligonucleotide
  modified_base 17..18: mod_base = OTHER; note = misc_feature - bicyclic nucleic acid scaffold modification
  source 1..18: mol_type = other RNA
cctgctcagcttcttcct

SEQ ID NO: 1076 - RNA, 22 nt, synthetic construct
  misc_feature 1..22: note = Antisense oligonucleotide
  source 1..22: mol_type = other RNA
gctcagcttcttccttagcttc

SEQ ID NO: 1077 - RNA, 22 nt, synthetic construct
  misc_feature 1..22: note = Antisense oligonucleotide
  modified_base 1: mod_base = OTHER; note = misc_feature - bicyclic nucleic acid scaffold modification
  source 1..22: mol_type = other RNA
gctcagcttcttccttagcttc

SEQ ID NO: 1078 - RNA, 22 nt, synthetic construct
  misc_feature 1..22: note = Antisense oligonucleotide
  modified_base 22: mod_base = OTHER; note = misc_feature - bicyclic nucleic acid scaffold modification
  source 1..22: mol_type = other RNA
gctcagcttcttccttagcttc

SEQ ID NO: 1079 - RNA, 22 nt, synthetic construct
  misc_feature 1..22: note = Antisense oligonucleotide
  modified_base 1: mod_base = OTHER; note = misc_feature - bicyclic nucleic acid scaffold modification
  modified_base 22: mod_base = OTHER; note = misc_feature - bicyclic nucleic acid scaffold modification
  source 1..22: mol_type = other RNA
gctcagcttcttccttagcttc

SEQ ID NO: 1080 - RNA, 22 nt, synthetic construct
  misc_feature 1..22: note = Antisense oligonucleotide
  modified_base 1..2: mod_base = OTHER; note = misc_feature - bicyclic nucleic acid scaffold modification
  source 1..22: mol_type = other RNA
gctcagcttcttccttagcttc

SEQ ID NO: 1081 - RNA, 22 nt, synthetic construct
  modified_base 21: mod_base = OTHER; note = thymine
  misc_feature 1..22: note = Antisense oligonucleotide
  modified_base 21..22: mod_base = OTHER; note = misc_feature - bicyclic nucleic acid scaffold modification
  source 1..22: mol_type = other RNA
gctcagcttcttccttagcttc

SEQ ID NO: 1082 - RNA, 20 nt, synthetic construct
  misc_feature 1..20: note = Antisense oligonucleotide
  source 1..20: mol_type = other RNA
gctcagcttcttccttagct

SEQ ID NO: 1083 - RNA, 20 nt, synthetic construct
  misc_feature 1..20: note = Antisense oligonucleotide
  modified_base 1: mod_base = OTHER; note = misc_feature - bicyclic nucleic acid scaffold modification
  source 1..20: mol_type = other RNA
gctcagcttcttccttagct

SEQ ID NO: 1084 - RNA, 20 nt, synthetic construct
  modified_base 20: mod_base = OTHER; note = thymine
  misc_feature 1..20: note = Antisense oligonucleotide
  modified_base 20: mod_base = OTHER; note = misc_feature - bicyclic nucleic acid scaffold modification
  source 1..20: mol_type = other RNA
gctcagcttcttccttagct

SEQ ID NO: 1085 - RNA, 20 nt, synthetic construct
  modified_base 20: mod_base = OTHER; note = thymine
  misc_feature 1..20: note = Antisense oligonucleotide
  modified_base 1: mod_base = OTHER; note = misc_feature - bicyclic nucleic acid scaffold modification
  modified_base 20: mod_base = OTHER; note = misc_feature - bicyclic nucleic acid scaffold modification
  source 1..20: mol_type = other RNA
gctcagcttcttccttagct

SEQ ID NO: 1086 - RNA, 20 nt, synthetic construct
  misc_feature 1..20: note = Antisense oligonucleotide
  modified_base 1..2: mod_base = OTHER; note = misc_feature - bicyclic nucleic acid scaffold modification
  source 1..20: mol_type = other RNA
gctcagcttcttccttagct

SEQ ID NO: 1087 - RNA, 20 nt, synthetic construct
  modified_base 20: mod_base = OTHER; note = thymine
  misc_feature 1..20: note = Antisense oligonucleotide
  modified_base 19..20: mod_base = OTHER; note = misc_feature - bicyclic nucleic acid scaffold modification
  source 1..20: mol_type = other RNA
gctcagcttcttccttagct

SEQ ID NO: 1088 - RNA, 18 nt, synthetic construct
  misc_feature 1..18: note = Antisense oligonucleotide
  source 1..18: mol_type = other RNA
gctcagcttcttccttag

SEQ ID NO: 1089 - RNA, 18 nt, synthetic construct
  misc_feature 1..18: note = Antisense oligonucleotide
  modified_base 1: mod_base = OTHER; note = misc_feature - bicyclic nucleic acid scaffold modification
  source 1..18: mol_type = other RNA
gctcagcttcttccttag

SEQ ID NO: 1090 - RNA, 18 nt, synthetic construct
  misc_feature 1..18: note = Antisense oligonucleotide
  modified_base 18: mod_base = OTHER; note = misc_feature - bicyclic nucleic acid scaffold modification
  source 1..18: mol_type = other RNA
gctcagcttcttccttag

SEQ ID NO: 1091 - RNA, 18 nt, synthetic construct
  misc_feature 1..18: note = Antisense oligonucleotide
  modified_base 1: mod_base = OTHER; note = misc_feature - bicyclic nucleic acid scaffold modification
  modified_base 18: mod_base = OTHER; note = misc_feature - bicyclic nucleic acid scaffold modification
  source 1..18: mol_type = other RNA
gctcagcttcttccttag

SEQ ID NO: 1092 - RNA, 18 nt, synthetic construct
  misc_feature 1..18: note = Antisense oligonucleotide
  modified_base 1..2: mod_base = OTHER; note = misc_feature - bicyclic nucleic acid scaffold modification
  source 1..18: mol_type = other RNA
gctcagcttcttccttag

SEQ ID NO: 1093 - RNA, 18 nt, synthetic construct
  misc_feature 1..18: note = Antisense oligonucleotide
  modified_base 17..18: mod_base = OTHER; note = misc_feature - bicyclic nucleic acid scaffold modification
  source 1..18: mol_type = other RNA
gctcagcttcttccttag

SEQ ID NO: 1094 - RNA, 16 nt, synthetic construct
  misc_feature 1..16: note = Antisense oligonucleotide
  source 1..16: mol_type = other RNA
gctcagcttcttcctt

SEQ ID NO: 1095 - RNA, 16 nt, synthetic construct
  misc_feature 1..16: note = Antisense oligonucleotide
  modified_base 1: mod_base = OTHER; note = misc_feature - bicyclic nucleic acid scaffold modification
  source 1..16: mol_type = other RNA
gctcagcttcttcctt

SEQ ID NO: 1096 - RNA, 16 nt, synthetic construct
  modified_base 16: mod_base = OTHER; note = thymine
  misc_feature 1..16: note = Antisense oligonucleotide
  modified_base 16: mod_base = OTHER; note = misc_feature - bicyclic nucleic acid scaffold modification
  source 1..16: mol_type = other RNA
gctcagcttcttcctt

SEQ ID NO: 1097 - RNA, 16 nt, synthetic construct
  modified_base 16: mod_base = OTHER; note = thymine
  misc_feature 1..16: note = Antisense oligonucleotide
  modified_base 1: mod_base = OTHER; note = misc_feature - bicyclic nucleic acid scaffold modification
  modified_base 16: mod_base = OTHER; note = misc_feature - bicyclic nucleic acid scaffold modification
  source 1..16: mol_type = other RNA
gctcagcttcttcctt

SEQ ID NO: 1098 - RNA, 16 nt, synthetic construct
  misc_feature 1..16: note = Antisense oligonucleotide
  modified_base 1..2: mod_base = OTHER; note = misc_feature - bicyclic nucleic acid scaffold modification
  source 1..16: mol_type = other RNA
gctcagcttcttcctt

SEQ ID NO: 1099 - RNA, 16 nt, synthetic construct
  modified_base 15..16: mod_base = OTHER; note = thymine
  misc_feature 1..16: note = Antisense oligonucleotide
  modified_base 15..16: mod_base = OTHER; note = misc_feature - bicyclic nucleic acid scaffold modification
  source 1..16: mol_type = other RNA
gctcagcttcttcctt

SEQ ID NO: 1100 - RNA, 20 nt, synthetic construct
  misc_feature 1..20: note = Antisense oligonucleotide
  source 1..20: mol_type = other RNA
tcagcttcttccttagcttc

SEQ ID NO: 1101 - RNA, 20 nt, synthetic construct
  modified_base 1: mod_base = OTHER; note = thymine
  misc_feature 1..20: note = Antisense oligonucleotide
  modified_base 1: mod_base = OTHER; note = misc_feature - bicyclic nucleic acid scaffold modification
  source 1..20: mol_type = other RNA
tcagcttcttccttagcttc

SEQ ID NO: 1102 - RNA, 20 nt, synthetic construct
  misc_feature 1..20: note = Antisense oligonucleotide
  modified_base 20: mod_base = OTHER; note = misc_feature - bicyclic nucleic acid scaffold modification
  source 1..20: mol_type = other RNA
tcagcttcttccttagcttc

SEQ ID NO: 1103 - RNA, 20 nt, synthetic construct
  modified_base 1: mod_base = OTHER; note = thymine
  misc_feature 1..20: note = Antisense oligonucleotide
  modified_base 1: mod_base = OTHER; note = misc_feature - bicyclic nucleic acid scaffold modification
  modified_base 20: mod_base = OTHER; note = misc_feature - bicyclic nucleic acid scaffold modification
  source 1..20: mol_type = other RNA
tcagcttcttccttagcttc

SEQ ID NO: 1104 - RNA, 20 nt, synthetic construct
  modified_base 1: mod_base = OTHER; note = thymine
  misc_feature 1..20: note = Antisense oligonucleotide
  modified_base 1..2: mod_base = OTHER; note = misc_feature - bicyclic nucleic acid scaffold modification
  source 1..20: mol_type = other RNA
tcagcttcttccttagcttc

SEQ ID NO: 1105 - RNA, 20 nt, synthetic construct
  modified_base 19: mod_base = OTHER; note = thymine
  misc_feature 1..20: note = Antisense oligonucleotide
  modified_base 19..20: mod_base = OTHER; note = misc_feature - bicyclic nucleic acid scaffold modification
  source 1..20: mol_type = other RNA
tcagcttcttccttagcttc

SEQ ID NO: 1106 - RNA, 18 nt, synthetic construct
  misc_feature 1..18: note = Antisense oligonucleotide
  source 1..18: mol_type = other RNA
agcttcttccttagcttc

SEQ ID NO: 1107 - RNA, 18 nt, synthetic construct
  misc_feature 1..18: note = Antisense oligonucleotide
  modified_base 1: mod_base = OTHER; note = misc_feature - bicyclic nucleic acid scaffold modification
  source 1..18: mol_type = other RNA
agcttcttccttagcttc

SEQ ID NO: 1108 - RNA, 18 nt, synthetic construct
  misc_feature 1..18: note = Antisense oligonucleotide
  modified_base 18: mod_base = OTHER; note = misc_feature - bicyclic nucleic acid scaffold modification
  source 1..18: mol_type = other RNA
agcttcttccttagcttc

SEQ ID NO: 1109 - RNA, 18 nt, synthetic construct
  misc_feature 1..18: note = Antisense oligonucleotide
  modified_base 1: mod_base = OTHER; note = misc_feature - bicyclic nucleic acid scaffold modification
  modified_base 18: mod_base = OTHER; note = misc_feature - bicyclic nucleic acid scaffold modification
  source 1..18: mol_type = other RNA
agcttcttccttagcttc

SEQ ID NO: 1110 - RNA, 18 nt, synthetic construct
  misc_feature 1..18: note = Antisense oligonucleotide
  modified_base 1..2: mod_base = OTHER; note = misc_feature - bicyclic nucleic acid scaffold modification
  source 1..18: mol_type = other RNA
agcttcttccttagcttc

SEQ ID NO: 1111 - RNA, 18 nt, synthetic construct
  modified_base 17: mod_base = OTHER; note = thymine
  misc_feature 1..18: note = Antisense oligonucleotide
  modified_base 17..18: mod_base = OTHER; note = misc_feature - bicyclic nucleic acid scaffold modification
  source 1..18: mol_type = other RNA
agcttcttccttagcttc

SEQ ID NO: 1112 - RNA, 16 nt, synthetic construct
  misc_feature 1..16: note = Antisense oligonucleotide
  source 1..16: mol_type = other RNA
cttcttccttagcttc

SEQ ID NO: 1113 - RNA, 16 nt, synthetic construct
  misc_feature 1..16: note = Antisense oligonucleotide
  modified_base 1: mod_base = OTHER; note = misc_feature - bicyclic nucleic acid scaffold modification
  source 1..16: mol_type = other RNA
cttcttccttagcttc

SEQ ID NO: 1114 - RNA, 16 nt, synthetic construct
  misc_feature 1..16: note = Antisense oligonucleotide
  modified_base 16: mod_base = OTHER; note = misc_feature - bicyclic nucleic acid scaffold modification
  source 1..16: mol_type = other RNA
cttcttccttagcttc

SEQ ID NO: 1115 - RNA, 16 nt, synthetic construct
  misc_feature 1..16: note = Antisense oligonucleotide
  modified_base 1: mod_base = OTHER; note = misc_feature - bicyclic nucleic acid scaffold modification
  modified_base 16: mod_base = OTHER; note = misc_feature - bicyclic nucleic acid scaffold modification
  source 1..16: mol_type = other RNA
cttcttccttagcttc

SEQ ID NO: 1116 - RNA, 16 nt, synthetic construct
  modified_base 2: mod_base = OTHER; note = thymine
  misc_feature 1..16: note = Antisense oligonucleotide
  modified_base 1..2: mod_base = OTHER; note = misc_feature - bicyclic nucleic acid scaffold modification
  source 1..16: mol_type = other RNA
cttcttccttagcttc

SEQ ID NO: 1117 - RNA, 16 nt, synthetic construct
  modified_base 15: mod_base = OTHER; note = thymine
  misc_feature 1..16: note = Antisense oligonucleotide
  modified_base 15..16: mod_base = OTHER; note = misc_feature - bicyclic nucleic acid scaffold modification
  source 1..16: mol_type = other RNA
cttcttccttagcttc

SEQ ID NO: 1118 - RNA, 18 nt, synthetic construct
  misc_feature 1..18: note = Antisense oligonucleotide
  source 1..18: mol_type = other RNA
tcagcttcttccttagct

SEQ ID NO: 1119 - RNA, 18 nt, synthetic construct
  modified_base 1: mod_base = OTHER; note = thymine
  misc_feature 1..18: note = Antisense oligonucleotide
  modified_base 1: mod_base = OTHER; note = misc_feature - bicyclic nucleic acid scaffold modification
  source 1..18: mol_type = other RNA
tcagcttcttccttagct

SEQ ID NO: 1120 - RNA, 18 nt, synthetic construct
  modified_base 18: mod_base = OTHER; note = thymine
  misc_feature 1..18: note = Antisense oligonucleotide
  modified_base 18: mod_base = OTHER; note = misc_feature - bicyclic nucleic acid scaffold modification
  source 1..18: mol_type = other RNA
tcagcttcttccttagct

SEQ ID NO: 1121 - RNA, 18 nt, synthetic construct
  modified_base 1: mod_base = OTHER; note = thymine
  modified_base 18: mod_base = OTHER; note = thymine
  misc_feature 1..18: note = Antisense oligonucleotide
  modified_base 1: mod_base = OTHER; note = misc_feature - bicyclic nucleic acid scaffold modification
  modified_base 18: mod_base = OTHER; note = misc_feature - bicyclic nucleic acid scaffold modification
  source 1..18: mol_type = other RNA
tcagcttcttccttagct

SEQ ID NO: 1122 - RNA, 18 nt, synthetic construct
  modified_base 1: mod_base = OTHER; note = thymine
  misc_feature 1..18: note = Antisense oligonucleotide
  modified_base 1..2: mod_base = OTHER; note = misc_feature - bicyclic nucleic acid scaffold modification
  source 1..18: mol_type = other RNA
tcagcttcttccttagct

SEQ ID NO: 1123 - RNA, 18 nt, synthetic construct
  modified_base 18: mod_base = OTHER; note = thymine
  misc_feature 1..18: note = Antisense oligonucleotide
  modified_base 17..18: mod_base = OTHER; note = misc_feature - bicyclic nucleic acid scaffold modification
  source 1..18: mol_type = other RNA
tcagcttcttccttagct

SEQ ID NO: 1124 - RNA, 21 nt, synthetic construct
  misc_feature 1..21: note = Antisense oligonucleotide
  source 1..21: mol_type = other RNA
ccactgattctgaattctttc

SEQ ID NO: 1125 - RNA, 21 nt, synthetic construct
  misc_feature 1..21: note = Antisense oligonucleotide
  modified_base 1: mod_base = OTHER; note = misc_feature - bicyclic nucleic acid scaffold modification
  source 1..21: mol_type = other RNA
ccactgattctgaattctttc

SEQ ID NO: 1126 - RNA, 21 nt, synthetic construct
  misc_feature 1..21: note = Antisense oligonucleotide
  modified_base 21: mod_base = OTHER; note = misc_feature - bicyclic nucleic acid scaffold modification
  source 1..21: mol_type = other RNA
ccactgattctgaattctttc

SEQ ID NO: 1127 - RNA, 21 nt, synthetic construct
  misc_feature 1..21: note = Antisense oligonucleotide
  modified_base 1: mod_base = OTHER; note = misc_feature - bicyclic nucleic acid scaffold modification
  modified_base 21: mod_base = OTHER; note = misc_feature - bicyclic nucleic acid scaffold modification
  source 1..21: mol_type = other RNA
ccactgattctgaattctttc

SEQ ID NO: 1128 - RNA, 21 nt, synthetic construct
  misc_feature 1..21: note = Antisense oligonucleotide
  modified_base 1..2: mod_base = OTHER; note = misc_feature - bicyclic nucleic acid scaffold modification
  source 1..21: mol_type = other RNA
ccactgattctgaattctttc

SEQ ID NO: 1129 - RNA, 21 nt, synthetic construct
  modified_base 20: mod_base = OTHER; note = thymine
  misc_feature 1..21: note = Antisense oligonucleotide
  modified_base 20..21: mod_base = OTHER; note = misc_feature - bicyclic nucleic acid scaffold modification
  source 1..21: mol_type = other RNA
ccactgattctgaattctttc

SEQ ID NO: 1130 - RNA, 18 nt, synthetic construct
  misc_feature 1..18: note = Antisense oligonucleotide
  source 1..18: mol_type = other RNA
ccactgattctgaattct

SEQ ID NO: 1131 - RNA, 18 nt, synthetic construct
  misc_feature 1..18: note = Antisense oligonucleotide
  modified_base 1: mod_base = OTHER; note = misc_feature - bicyclic nucleic acid scaffold modification
  source 1..18: mol_type = other RNA
ccactgattctgaattct

SEQ ID NO: 1132 - RNA, 18 nt, synthetic construct
  modified_base 18: mod_base = OTHER; note = thymine
  misc_feature 1..18: note = Antisense oligonucleotide
  modified_base 18: mod_base = OTHER; note = misc_feature - bicyclic nucleic acid scaffold modification
  source 1..18: mol_type = other RNA
ccactgattctgaattct

SEQ ID NO: 1133 - RNA, 18 nt, synthetic construct
  modified_base 18: mod_base = OTHER; note = thymine
  misc_feature 1..18: note = Antisense oligonucleotide
  modified_base 1: mod_base = OTHER; note = misc_feature - bicyclic nucleic acid scaffold modification
  modified_base 18: mod_base = OTHER; note = misc_feature - bicyclic nucleic acid scaffold modification
  source 1..18: mol_type = other RNA
ccactgattctgaattct

SEQ ID NO: 1134 - RNA, 18 nt, synthetic construct
  misc_feature 1..18: note = Antisense oligonucleotide
  modified_base 1..2: mod_base = OTHER; note = misc_feature - bicyclic nucleic acid scaffold modification
  source 1..18: mol_type = other RNA
ccactgattctgaattct

SEQ ID NO: 1135 - RNA, 18 nt, synthetic construct
  modified_base 18: mod_base = OTHER; note = thymine
  misc_feature 1..18: note = Antisense oligonucleotide
  modified_base 17..18: mod_base = OTHER; note = misc_feature - bicyclic nucleic acid scaffold modification
  source 1..18: mol_type = other RNA
ccactgattctgaattct

SEQ ID NO: 1136 - RNA, 16 nt, synthetic construct
  misc_feature 1..16: note = Antisense oligonucleotide
  source 1..16: mol_type = other RNA
ccactgattctgaatt

SEQ ID NO: 1137 - RNA, 16 nt, synthetic construct
  misc_feature 1..16: note = Antisense oligonucleotide
  modified_base 1: mod_base = OTHER; note = misc_feature - bicyclic nucleic acid scaffold modification
  source 1..16: mol_type = other RNA
ccactgattctgaatt

SEQ ID NO: 1138 - RNA, 16 nt, synthetic construct
  modified_base 16: mod_base = OTHER; note = thymine
  misc_feature 1..16: note = Antisense oligonucleotide
  modified_base 16: mod_base = OTHER; note = misc_feature - bicyclic nucleic acid scaffold modification
  source 1..16: mol_type = other RNA
ccactgattctgaatt

SEQ ID NO: 1139 - RNA, 16 nt, synthetic construct
  modified_base 16: mod_base = OTHER; note = thymine
  misc_feature 1..16: note = Antisense oligonucleotide
  modified_base 1: mod_base = OTHER; note = misc_feature - bicyclic nucleic acid scaffold modification
  modified_base 16: mod_base = OTHER; note = misc_feature - bicyclic nucleic acid scaffold modification
  source 1..16: mol_type = other RNA
ccactgattctgaatt

SEQ ID NO: 1140 - RNA, 16 nt, synthetic construct
  misc_feature 1..16: note = Antisense oligonucleotide
  modified_base 1..2: mod_base = OTHER; note = misc_feature - bicyclic nucleic acid scaffold modification
  source 1..16: mol_type = other RNA
ccactgattctgaatt

SEQ ID NO: 1141 - RNA, 16 nt, synthetic construct
  modified_base 15..16: mod_base = OTHER; note = thymine
  misc_feature 1..16: note = Antisense oligonucleotide
  modified_base 15..16: mod_base = OTHER; note = misc_feature - bicyclic nucleic acid scaffold modification
  source 1..16: mol_type = other RNA
ccactgattctgaatt

SEQ ID NO: 1142 - RNA, 18 nt, synthetic construct
  misc_feature 1..18: note = Antisense oligonucleotide
  source 1..18: mol_type = other RNA
ctgattctgaattctttc

SEQ ID NO: 1143 - RNA, 18 nt, synthetic construct
  misc_feature 1..18: note = Antisense oligonucleotide
  modified_base 1: mod_base = OTHER; note = misc_feature - bicyclic nucleic acid scaffold modification
  source 1..18: mol_type = other RNA
ctgattctgaattctttc

SEQ ID NO: 1144 - RNA, 18 nt, synthetic construct
  misc_feature 1..18: note = Antisense oligonucleotide
  modified_base 18: mod_base = OTHER; note = misc_feature - bicyclic nucleic acid scaffold modification
  source 1..18: mol_type = other RNA
ctgattctgaattctttc

SEQ ID NO: 1145 - RNA, 18 nt, synthetic construct
  misc_feature 1..18: note = Antisense oligonucleotide
  modified_base 1: mod_base = OTHER; note = misc_feature - bicyclic nucleic acid scaffold modification
  modified_base 18: mod_base = OTHER; note = misc_feature - bicyclic nucleic acid scaffold modification
  source 1..18: mol_type = other RNA
ctgattctgaattctttc

SEQ ID NO: 1146 - RNA, 18 nt, synthetic construct
  modified_base 2: mod_base = OTHER; note = thymine
  misc_feature 1..18: note = Antisense oligonucleotide
  modified_base 1..2: mod_base = OTHER; note = misc_feature - bicyclic nucleic acid scaffold modification
  source 1..18: mol_type = other RNA
ctgattctgaattctttc

SEQ ID NO: 1147 - RNA, 18 nt, synthetic construct
  modified_base 17: mod_base = OTHER; note = thymine
  misc_feature 1..18: note = Antisense oligonucleotide
  modified_base 17..18: mod_base = OTHER; note = misc_feature - bicyclic nucleic acid scaffold modification
  source 1..18: mol_type = other RNA
ctgattctgaattctttc

SEQ ID NO: 1148 - RNA, 16 nt, synthetic construct
  misc_feature 1..16: note = Antisense oligonucleotide
  source 1..16: mol_type = other RNA
gattctgaattctttc

SEQ ID NO: 1149 - RNA, 16 nt, synthetic construct
  misc_feature 1..16: note = Antisense oligonucleotide
  modified_base 1: mod_base = OTHER; note = misc_feature - bicyclic nucleic acid scaffold modification
  source 1..16: mol_type = other RNA
gattctgaattctttc

SEQ ID NO: 1150 - RNA, 16 nt, synthetic construct
  misc_feature 1..16: note = Antisense oligonucleotide
  modified_base 16: mod_base = OTHER; note = misc_feature - bicyclic nucleic acid scaffold modification
  source 1..16: mol_type = other RNA
gattctgaattctttc

SEQ ID NO: 1151 - RNA, 16 nt, synthetic construct
  misc_feature 1..16: note = Antisense oligonucleotide
  modified_base 1: mod_base = OTHER; note = misc_feature - bicyclic nucleic acid scaffold modification
  modified_base 16: mod_base = OTHER; note = misc_feature - bicyclic nucleic acid scaffold modification
  source 1..16: mol_type = other RNA
gattctgaattctttc

SEQ ID NO: 1152 - RNA, 16 nt, synthetic construct
  misc_feature 1..16: note = Antisense oligonucleotide
  modified_base 1..2: mod_base = OTHER; note = misc_feature - bicyclic nucleic acid scaffold modification
  source 1..16: mol_type = other RNA
gattctgaattctttc

SEQ ID NO: 1153 - RNA, 16 nt, synthetic construct
  modified_base 15: mod_base = OTHER; note = thymine
  misc_feature 1..16: note = Antisense oligonucleotide
  modified_base 15..16: mod_base = OTHER; note = misc_feature - bicyclic nucleic acid scaffold modification
  source 1..16: mol_type = other RNA
gattctgaattctttc

SEQ ID NO: 1154 - RNA, 18 nt, synthetic construct
  misc_feature 1..18: note = Antisense oligonucleotide
  source 1..18: mol_type = other RNA
cactgattctgaattctt

SEQ ID NO: 1155 - RNA, 18 nt, synthetic construct
  misc_feature 1..18: note = Antisense oligonucleotide
  modified_base 1: mod_base = OTHER; note = misc_feature - bicyclic nucleic acid scaffold modification
  source 1..18: mol_type = other RNA
cactgattctgaattctt

SEQ ID NO: 1156 - RNA, 18 nt, synthetic construct
  modified_base 18: mod_base = OTHER; note = thymine
  misc_feature 1..18: note = Antisense oligonucleotide
  modified_base 18: mod_base = OTHER; note = misc_feature - bicyclic nucleic acid scaffold modification
  source 1..18: mol_type = other RNA
cactgattctgaattctt

SEQ ID NO: 1157 - RNA, 18 nt, synthetic construct
  modified_base 18: mod_base = OTHER; note = thymine
  misc_feature 1..18: note = Antisense oligonucleotide
  modified_base 1: mod_base = OTHER; note = misc_feature - bicyclic nucleic acid scaffold modification
  modified_base 18: mod_base = OTHER; note = misc_feature - bicyclic nucleic acid scaffold modification
  source 1..18: mol_type = other RNA
cactgattctgaattctt

SEQ ID NO: 1158 - RNA, 18 nt, synthetic construct
  misc_feature 1..18: note = Antisense oligonucleotide
  modified_base 1..2: mod_base = OTHER; note = misc_feature - bicyclic nucleic acid scaffold modification
  source 1..18: mol_type = other RNA
cactgattctgaattctt

SEQ ID NO: 1159 - RNA, 18 nt, synthetic construct
  modified_base 17..18: mod_base = OTHER; note = thymine
  misc_feature 1..18: note = Antisense oligonucleotide
  modified_base 17..18: mod_base = OTHER; note = misc_feature - bicyclic nucleic acid scaffold modification
  source 1..18: mol_type = other RNA
cactgattctgaattctt

SEQ ID NO: 1160 - RNA, 24 nt, synthetic construct
  misc_feature 1..24: note = Antisense oligonucleotide
  source 1..24: mol_type = other RNA
gagtttcttccaaagcagcctctc

SEQ ID NO: 1161 - RNA, 24 nt, synthetic construct
  misc_feature 1..24: note = Antisense oligonucleotide
  modified_base 1: mod_base = OTHER; note = misc_feature - bicyclic nucleic acid scaffold modification
  source 1..24: mol_type = other RNA
gagtttcttccaaagcagcctctc

SEQ ID NO: 1162 - RNA, 24 nt, synthetic construct
  misc_feature 1..24: note = Antisense oligonucleotide
  modified_base 24: mod_base = OTHER; note = misc_feature - bicyclic nucleic acid scaffold modification
  source 1..24: mol_type = other RNA
gagtttcttccaaagcagcctctc

SEQ ID NO: 1163 - RNA, 24 nt, synthetic construct
  misc_feature 1..24: note = Antisense oligonucleotide
  modified_base 1: mod_base = OTHER; note = misc_feature - bicyclic nucleic acid scaffold modification
  modified_base 24: mod_base = OTHER; note = misc_feature - bicyclic nucleic acid scaffold modification
  source 1..24: mol_type = other RNA
gagtttcttccaaagcagcctctc

SEQ ID NO: 1164 - RNA, 24 nt, synthetic construct
  misc_feature 1..24: note = Antisense oligonucleotide
  modified_base 1..2: mod_base = OTHER; note = misc_feature - bicyclic nucleic acid scaffold modification
  source 1..24: mol_type = other RNA
gagtttcttccaaagcagcctctc

SEQ ID NO: 1165 - RNA, 24 nt, synthetic construct
  modified_base 23: mod_base = OTHER; note = thymine
  misc_feature 1..24: note = Antisense oligonucleotide
  modified_base 23..24: mod_base = OTHER; note = misc_feature - bicyclic nucleic acid scaffold modification
  source 1..24: mol_type = other RNA
gagtttcttccaaagcagcctctc

SEQ ID NO: 1166 - RNA, 22 nt, synthetic construct
  misc_feature 1..22: note = Antisense oligonucleotide
  source 1..22: mol_type = other RNA
gagtttcttccaaagcagcctc

SEQ ID NO: 1167 - RNA, 22 nt, synthetic construct
  misc_feature 1..22: note = Antisense oligonucleotide
  modified_base 1: mod_base = OTHER; note = misc_feature - bicyclic nucleic acid scaffold modification
  source 1..22: mol_type = other RNA
gagtttcttccaaagcagcctc

SEQ ID NO: 1168 - RNA, 22 nt, synthetic construct
  misc_feature 1..22: note = Antisense oligonucleotide
  modified_base 22: mod_base = OTHER; note = misc_feature - bicyclic nucleic acid scaffold modification
  source 1..22: mol_type = other RNA
gagtttcttccaaagcagcctc

SEQ ID NO: 1169 - RNA, 22 nt, synthetic construct
  misc_feature 1..22: note = Antisense oligonucleotide
  modified_base 1: mod_base = OTHER; note = misc_feature - bicyclic nucleic acid scaffold modification
  modified_base 22: mod_base = OTHER; note = misc_feature - bicyclic nucleic acid scaffold modification
  source 1..22: mol_type = other RNA
gagtttcttccaaagcagcctc

SEQ ID NO: 1170 - RNA, 22 nt, synthetic construct
  misc_feature 1..22: note = Antisense oligonucleotide
  modified_base 1..2: mod_base = OTHER; note = misc_feature - bicyclic nucleic acid scaffold modification
  source 1..22: mol_type = other RNA
gagtttcttccaaagcagcctc

SEQ ID NO: 1171 - RNA, 22 nt, synthetic construct
  modified_base 21: mod_base = OTHER; note = thymine
  misc_feature 1..22: note = Antisense oligonucleotide
  modified_base 21..22: mod_base = OTHER; note = misc_feature - bicyclic nucleic acid scaffold modification
  source 1..22: mol_type = other RNA
gagtttcttccaaagcagcctc

SEQ ID NO: 1172 - RNA, 20 nt, synthetic construct
  misc_feature 1..20: note = Antisense oligonucleotide
  source 1..20: mol_type = other RNA
gagtttcttccaaagcagcc

SEQ ID NO: 1173 - RNA, 20 nt, synthetic construct
  misc_feature 1..20: note = Antisense oligonucleotide
  modified_base 1: mod_base = OTHER; note = misc_feature - bicyclic nucleic acid scaffold modification
  source 1..20: mol_type = other RNA
gagtttcttccaaagcagcc

SEQ ID NO: 1174 - RNA, 20 nt, synthetic construct
  misc_feature 1..20: note = Antisense oligonucleotide
  modified_base 20: mod_base = OTHER; note = misc_feature - bicyclic nucleic acid scaffold modification
  source 1..20: mol_type = other RNA
gagtttcttccaaagcagcc

SEQ ID NO: 1175 - RNA, 20 nt, synthetic construct
  misc_feature 1..20: note = Antisense oligonucleotide
  modified_base 1: mod_base = OTHER; note = misc_feature - bicyclic nucleic acid scaffold modification
  modified_base 20: mod_base = OTHER; note = misc_feature - bicyclic nucleic acid scaffold modification
  source 1..20: mol_type = other RNA
gagtttcttccaaagcagcc

SEQ ID NO: 1176 - RNA, 20 nt, synthetic construct
  misc_feature 1..20: note = Antisense oligonucleotide
  modified_base 1..2: mod_base = OTHER; note = misc_feature - bicyclic nucleic acid scaffold modification
  source 1..20: mol_type = other RNA
gagtttcttccaaagcagcc

SEQ ID NO: 1177 - RNA, 20 nt, synthetic construct
  misc_feature 1..20: note = Antisense oligonucleotide
  modified_base 19..20: mod_base = OTHER; note = misc_feature - bicyclic nucleic acid scaffold modification
  source 1..20: mol_type = other RNA
gagtttcttccaaagcagcc

SEQ ID NO: 1178 - RNA, 18 nt, synthetic construct
  misc_feature 1..18: note = Antisense oligonucleotide
  source 1..18: mol_type = other RNA
gagtttcttccaaagcag

SEQ ID NO: 1179 - RNA, 18 nt, synthetic construct
  misc_feature 1..18: note = Antisense oligonucleotide
  modified_base 1: mod_base = OTHER; note = misc_feature - bicyclic nucleic acid scaffold modification
  source 1..18: mol_type = other RNA
gagtttcttccaaagcag

SEQ ID NO: 1180 - RNA, 18 nt, synthetic construct
  misc_feature 1..18: note = Antisense oligonucleotide
  modified_base 18: mod_base = OTHER; note = misc_feature - bicyclic nucleic acid scaffold modification
  source 1..18: mol_type = other RNA
gagtttcttccaaagcag

SEQ ID NO: 1181 - RNA, 18 nt, synthetic construct
  misc_feature 1..18: note = Antisense oligonucleotide
  modified_base 1: mod_base = OTHER; note = misc_feature - bicyclic nucleic acid scaffold modification
  modified_base 18: mod_base = OTHER; note = misc_feature - bicyclic nucleic acid scaffold modification
  source 1..18: mol_type = other RNA
gagtttcttccaaagcag

SEQ ID NO: 1182 - RNA, 18 nt, synthetic construct
  misc_feature 1..18: note = Antisense oligonucleotide
  modified_base 1..2: mod_base = OTHER; note = misc_feature - bicyclic nucleic acid scaffold modification
  source 1..18: mol_type = other RNA
gagtttcttccaaagcag

SEQ ID NO: 1183 - RNA, 18 nt, synthetic construct
  misc_feature 1..18: note = Antisense oligonucleotide
  modified_base 17..18: mod_base = OTHER; note = misc_feature - bicyclic nucleic acid scaffold modification
  source 1..18: mol_type = other RNA
gagtttcttccaaagcag

SEQ ID NO: 1184 - RNA, 16 nt, synthetic construct
  misc_feature 1..16: note = Antisense oligonucleotide
  source 1..16: mol_type = other RNA
gagtttcttccaaagc

SEQ ID NO: 1185 - RNA, 16 nt, synthetic construct
  misc_feature 1..16: note = Antisense oligonucleotide
  modified_base 1: mod_base = OTHER; note = misc_feature - bicyclic nucleic acid scaffold modification
  source 1..16: mol_type = other RNA
gagtttcttccaaagc

SEQ ID NO: 1186 - RNA, 16 nt, synthetic construct
  misc_feature 1..16: note = Antisense oligonucleotide
  modified_base 16: mod_base = OTHER; note = misc_feature - bicyclic nucleic acid scaffold modification
  source 1..16: mol_type = other RNA
gagtttcttccaaagc

SEQ ID NO: 1187 - RNA, 16 nt, synthetic construct
  misc_feature 1..16: note = Antisense oligonucleotide
  modified_base 1: mod_base = OTHER; note = misc_feature - bicyclic nucleic acid scaffold modification
  modified_base 16: mod_base = OTHER; note = misc_feature - bicyclic nucleic acid scaffold modification
  source 1..16: mol_type = other RNA
gagtttcttccaaagc

SEQ ID NO: 1188 - RNA, 16 nt, synthetic construct
  misc_feature 1..16: note = Antisense oligonucleotide
  modified_base 1..2: mod_base = OTHER; note = misc_feature - bicyclic nucleic acid scaffold modification
  source 1..16: mol_type = other RNA
gagtttcttccaaagc

SEQ ID NO: 1189 - RNA, 16 nt, synthetic construct
  misc_feature 1..16: note = Antisense oligonucleotide
  modified_base 15..16: mod_base = OTHER; note = misc_feature - bicyclic nucleic acid scaffold modification
  source 1..16: mol_type = other RNA
gagtttcttccaaagc

SEQ ID NO: 1190 - RNA, 22 nt, synthetic construct
  misc_feature 1..22: note = Antisense oligonucleotide
  source 1..22: mol_type = other RNA
gtttcttccaaagcagcctctc

SEQ ID NO: 1191 - RNA, 22 nt, synthetic construct
  misc_feature 1..22: note = Antisense oligonucleotide
  modified_base 1: mod_base = OTHER; note = misc_feature - bicyclic nucleic acid scaffold modification
  source 1..22: mol_type = other RNA
gtttcttccaaagcagcctctc

SEQ ID NO: 1192 - RNA, 22 nt, synthetic construct
  misc_feature 1..22: note = Antisense oligonucleotide
  modified_base 22: mod_base = OTHER; note = misc_feature - bicyclic nucleic acid scaffold modification
  source 1..22: mol_type = other RNA
gtttcttccaaagcagcctctc

SEQ ID NO: 1193 - RNA, 22 nt, synthetic construct
  misc_feature 1..22: note = Antisense oligonucleotide
  modified_base 1: mod_base = OTHER; note = misc_feature - bicyclic nucleic acid scaffold modification
  modified_base 22: mod_base = OTHER; note = misc_feature - bicyclic nucleic acid scaffold modification
  source 1..22: mol_type = other RNA
gtttcttccaaagcagcctctc

SEQ ID NO: 1194 - RNA, 22 nt, synthetic construct
  modified_base 2: mod_base = OTHER; note = thymine
  misc_feature 1..22: note = Antisense oligonucleotide
  modified_base 1..2: mod_base = OTHER; note = misc_feature - bicyclic nucleic acid scaffold modification
  source 1..22: mol_type = other RNA
gtttcttccaaagcagcctctc

SEQ ID NO: 1195 - RNA, 22 nt, synthetic construct
  modified_base 21: mod_base = OTHER; note = thymine
  misc_feature 1..22: note = Antisense oligonucleotide
  modified_base 21..22: mod_base = OTHER; note = misc_feature - bicyclic nucleic acid scaffold modification
  source 1..22: mol_type = other RNA
gtttcttccaaagcagcctctc

SEQ ID NO: 1196 - RNA, 20 nt, synthetic construct
  misc_feature 1..20: note = Antisense oligonucleotide
  source 1..20: mol_type = other RNA
ttcttccaaagcagcctctc

SEQ ID NO: 1197 - RNA, 20 nt, synthetic construct
  modified_base 1: mod_base = OTHER; note = thymine
  misc_feature 1..20: note = Antisense oligonucleotide
  modified_base 1: mod_base = OTHER; note = misc_feature - bicyclic nucleic acid scaffold modification
  source 1..20: mol_type = other RNA
ttcttccaaagcagcctctc

SEQ ID NO: 1198 - RNA, 20 nt, synthetic construct
  misc_feature 1..20: note = Antisense oligonucleotide
  modified_base 20: mod_base = OTHER; note = misc_feature - bicyclic nucleic acid scaffold modification
  source 1..20: mol_type = other RNA
ttcttccaaagcagcctctc

SEQ ID NO: 1199 - RNA, 20 nt, synthetic construct
  modified_base 1: mod_base = OTHER; note = thymine
  misc_feature 1..20: note = Antisense oligonucleotide
  modified_base 1: mod_base = OTHER; note = misc_feature - bicyclic nucleic acid scaffold modification
  modified_base 20: mod_base = OTHER; note = misc_feature - bicyclic nucleic acid scaffold modification
  source 1..20: mol_type = other RNA
ttcttccaaagcagcctctc

SEQ ID NO: 1200 - RNA, 20 nt, synthetic construct
  modified_base 1..2: mod_base = OTHER; note = thymine
  misc_feature 1..20: note = Antisense oligonucleotide
  modified_base 1..2: mod_base = OTHER; note = misc_feature - bicyclic nucleic acid scaffold modification
  source 1..20: mol_type = other RNA
ttcttccaaagcagcctctc

SEQ ID NO: 1201 - RNA, 20 nt, synthetic construct
  modified_base 19: mod_base = OTHER; note = thymine
  misc_feature 1..20: note = Antisense oligonucleotide
  modified_base 19..20: mod_base = OTHER; note = misc_feature - bicyclic nucleic acid scaffold modification
  source 1..20: mol_type = other RNA
ttcttccaaagcagcctctc

SEQ ID NO: 1202 - RNA, 18 nt, synthetic construct
  misc_feature 1..18: note = Antisense oligonucleotide
  source 1..18: mol_type = other RNA
cttccaaagcagcctctc

SEQ ID NO: 1203 - RNA, 18 nt, synthetic construct
  misc_feature 1..18: note = Antisense oligonucleotide
  modified_base 1: mod_base = OTHER; note = misc_feature - bicyclic nucleic acid scaffold modification
  source 1..18: mol_type = other RNA
cttccaaagcagcctctc

SEQ ID NO: 1204 - RNA, 18 nt, synthetic construct
  misc_feature 1..18: note = Antisense oligonucleotide
  modified_base 18: mod_base = OTHER; note = misc_feature - bicyclic nucleic acid scaffold modification
  source 1..18: mol_type = other RNA
cttccaaagcagcctctc

SEQ ID NO: 1205 - RNA, 18 nt, synthetic construct
  misc_feature 1..18: note = Antisense oligonucleotide
  modified_base 1: mod_base = OTHER; note = misc_feature - bicyclic nucleic acid scaffold modification
  modified_base 18: mod_base = OTHER; note = misc_feature - bicyclic nucleic acid scaffold modification
  source 1..18: mol_type = other RNA
cttccaaagcagcctctc

SEQ ID NO: 1206 - RNA, 18 nt, synthetic construct
  modified_base 2: mod_base = OTHER; note = thymine
  misc_feature 1..18: note = Antisense oligonucleotide
  modified_base 1..2: mod_base = OTHER; note = misc_feature - bicyclic nucleic acid scaffold modification
  source 1..18: mol_type = other RNA
cttccaaagcagcctctc

SEQ ID NO: 1207 - RNA, 18 nt, synthetic construct
  modified_base 17: mod_base = OTHER; note = thymine
  misc_feature 1..18: note = Antisense oligonucleotide
  modified_base 17..18: mod_base = OTHER; note = misc_feature - bicyclic nucleic acid scaffold modification
  source 1..18: mol_type = other RNA
cttccaaagcagcctctc

SEQ ID NO: 1208 - RNA, 16 nt, synthetic construct
  misc_feature 1..16: note = Antisense oligonucleotide
  source 1..16: mol_type = other RNA
tccaaagcagcctctc

SEQ ID NO: 1209 - RNA, 16 nt, synthetic construct
  modified_base 1: mod_base = OTHER; note = thymine
  misc_feature 1..16: note = Antisense oligonucleotide
  modified_base 1: mod_base = OTHER; note = misc_feature - bicyclic nucleic acid scaffold modification
  source 1..16: mol_type = other RNA
tccaaagcagcctctc

SEQ ID NO: 1210 - RNA, 16 nt, synthetic construct
  misc_feature 1..16: note = Antisense oligonucleotide
  modified_base 16: mod_base = OTHER; note = misc_feature - bicyclic nucleic acid scaffold modification
  source 1..16: mol_type = other RNA
tccaaagcagcctctc

SEQ ID NO: 1211 - RNA, 16 nt, synthetic construct
  modified_base 1: mod_base = OTHER; note = thymine
  misc_feature 1..16: note = Antisense oligonucleotide
  modified_base 1: mod_base = OTHER; note = misc_feature - bicyclic nucleic acid scaffold modification
  modified_base 16: mod_base = OTHER; note = misc_feature - bicyclic nucleic acid scaffold modification
  source 1..16: mol_type = other RNA
tccaaagcagcctctc

SEQ ID NO: 1212 - RNA, 16 nt, synthetic construct
  modified_base 1: mod_base = OTHER; note = thymine
  misc_feature 1..16: note = Antisense oligonucleotide
  modified_base 1..2: mod_base = OTHER; note = misc_feature - bicyclic nucleic acid scaffold modification
  source 1..16: mol_type = other RNA
tccaaagcagcctctc

SEQ ID NO: 1213 - RNA, 16 nt, synthetic construct
  modified_base 15: mod_base = OTHER; note = thymine
  misc_feature 1..16: note = Antisense oligonucleotide
  modified_base 15..16: mod_base = OTHER; note = misc_feature - bicyclic nucleic acid scaffold modification
  source 1..16: mol_type = other RNA
tccaaagcagcctctc

SEQ ID NO: 1214 - RNA, 18 nt, synthetic construct
  misc_feature 1..18: note = Antisense oligonucleotide
  source 1..18: mol_type = other RNA
tttcttccaaagcagcct

SEQ ID NO: 1215 - RNA, 18 nt, synthetic construct
  modified_base 1: mod_base = OTHER; note = thymine
  misc_feature 1..18: note = Antisense oligonucleotide
  modified_base 1: mod_base = OTHER; note = misc_feature - bicyclic nucleic acid scaffold modification
  source 1..18: mol_type = other RNA
tttcttccaaagcagcct

SEQ ID NO: 1216 - RNA, 18 nt, synthetic construct
  modified_base 18: mod_base = OTHER; note = thymine
  misc_feature 1..18: note = Antisense oligonucleotide
  modified_base 18: mod_base = OTHER; note = misc_feature - bicyclic nucleic acid scaffold modification
  source 1..18: mol_type = other RNA
tttcttccaaagcagcct

SEQ ID NO: 1217 - RNA, 18 nt, synthetic construct
  modified_base 1: mod_base = OTHER; note = thymine
  modified_base 18: mod_base = OTHER; note = thymine
  misc_feature 1..18: note = Antisense oligonucleotide
  modified_base 1: mod_base = OTHER; note = misc_feature - bicyclic nucleic acid scaffold modification
  modified_base 18: mod_base = OTHER; note = misc_feature - bicyclic nucleic acid scaffold modification
  source 1..18: mol_type = other RNA
tttcttccaaagcagcct

SEQ ID NO: 1218 - RNA, 18 nt, synthetic construct
  modified_base 1..2: mod_base = OTHER; note = thymine
  misc_feature 1..18: note = Antisense oligonucleotide
  modified_base 1..2: mod_base = OTHER; note = misc_feature - bicyclic nucleic acid scaffold modification
  source 1..18: mol_type = other RNA
tttcttccaaagcagcct

SEQ ID NO: 1219 - RNA, 18 nt, synthetic construct
  modified_base 18: mod_base = OTHER; note = thymine
  misc_feature 1..18: note = Antisense oligonucleotide
  modified_base 17..18: mod_base = OTHER; note = misc_feature - bicyclic nucleic acid scaffold modification
  source 1..18: mol_type = other RNA
tttcttccaaagcagcct

SEQ ID NO: 1220 - RNA, 25 nt, synthetic construct
  misc_feature 1..25: note = Antisense oligonucleotide
  source 1..25: mol_type = other RNA
tatgagtttcttccaaagcagcctc

SEQ ID NO: 1221 - RNA, 25 nt, synthetic construct
  modified_base 1: mod_base = OTHER; note = thymine
  misc_feature 1..25: note = Antisense oligonucleotide
  modified_base 1: mod_base = OTHER; note = misc_feature - bicyclic nucleic acid scaffold modification
  source 1..25: mol_type = other RNA
tatgagtttcttccaaagcagcctc

SEQ ID NO: 1222 - RNA, 25 nt, synthetic construct
  misc_feature 1..25: note = Antisense oligonucleotide
  modified_base 25: mod_base = OTHER; note = misc_feature - bicyclic nucleic acid scaffold modification
  source 1..25: mol_type = other RNA
tatgagtttcttccaaagcagcctc

SEQ ID NO: 1223 - RNA, 25 nt, synthetic construct
  modified_base 1: mod_base = OTHER; note = thymine
  misc_feature 1..25: note = Antisense oligonucleotide
  modified_base 1: mod_base = OTHER; note = misc_feature - bicyclic nucleic acid scaffold modification
  modified_base 25: mod_base = OTHER; note = misc_feature - bicyclic nucleic acid scaffold modification
  source 1..25: mol_type = other RNA
tatgagtttcttccaaagcagcctc

SEQ ID NO: 1224 - RNA, 25 nt, synthetic construct
  modified_base 1: mod_base = OTHER; note = thymine
  misc_feature 1..25: note = Antisense oligonucleotide
  modified_base 1..2: mod_base = OTHER; note = misc_feature - bicyclic nucleic acid scaffold modification
  source 1..25: mol_type = other RNA
tatgagtttcttccaaagcagcctc

SEQ ID NO: 1225 - RNA, 25 nt, synthetic construct
  misc_feature 1..25: note = Antisense oligonucleotide
  modified_base 24..25: mod_base = OTHER; note = misc_feature - bicyclic nucleic acid scaffold modification
  source 1..25: mol_type = other RNA
tatgagtttcttccaaagcagcctc

SEQ ID NO: 1226 - RNA, 22 nt, synthetic construct
  misc_feature 1..22: note = Antisense oligonucleotide
  source 1..22: mol_type = other RNA
tatgagtttcttccaaagcagc

SEQ ID NO: 1227 - RNA, 22 nt, synthetic construct
  modified_base 1: mod_base = OTHER; note = thymine
  misc_feature 1..22: note = Antisense oligonucleotide
  modified_base 1: mod_base = OTHER; note = misc_feature - bicyclic nucleic acid scaffold modification
  source 1..22: mol_type = other RNA
tatgagtttcttccaaagcagc

SEQ ID NO: 1228 - RNA, 22 nt, synthetic construct
  misc_feature 1..22: note = Antisense oligonucleotide
  modified_base 22: mod_base = OTHER; note = misc_feature - bicyclic nucleic acid scaffold modification
  source 1..22: mol_type = other RNA
tatgagtttcttccaaagcagc

SEQ ID NO: 1229 - RNA, 22 nt, synthetic construct
  modified_base 1: mod_base = OTHER; note = thymine
  misc_feature 1..22: note = Antisense oligonucleotide
  modified_base 1: mod_base = OTHER; note = misc_feature - bicyclic nucleic acid scaffold modification
  modified_base 22: mod_base = OTHER; note = misc_feature - bicyclic nucleic acid scaffold modification
  source 1..22: mol_type = other RNA
tatgagtttcttccaaagcagc

SEQ ID NO: 1230 - RNA, 22 nt, synthetic construct
  modified_base 1: mod_base = OTHER; note = thymine
  misc_feature 1..22: note = Antisense oligonucleotide
  modified_base 1..2: mod_base = OTHER; note = misc_feature - bicyclic nucleic acid scaffold modification
  source 1..22: mol_type = other RNA
tatgagtttcttccaaagcagc

SEQ ID NO: 1231 - RNA, 22 nt, synthetic construct
  misc_feature 1..22: note = Antisense oligonucleotide
  modified_base 21..22: mod_base = OTHER; note = misc_feature - bicyclic nucleic acid scaffold modification
  source 1..22: mol_type = other RNA
tatgagtttcttccaaagcagc

SEQ ID NO: 1232 - RNA, 20 nt, synthetic construct
  misc_feature 1..20: note = Antisense oligonucleotide
  source 1..20: mol_type = other RNA
tatgagtttcttccaaagca

SEQ ID NO: 1233 - RNA, 20 nt, synthetic construct
  modified_base 1: mod_base = OTHER; note = thymine
  misc_feature 1..20: note = Antisense oligonucleotide
  modified_base 1: mod_base = OTHER; note = misc_feature - bicyclic nucleic acid scaffold modification
  source 1..20: mol_type = other RNA
tatgagtttcttccaaagca

SEQ ID NO: 1234 - RNA, 20 nt, synthetic construct
  misc_feature 1..20: note = Antisense oligonucleotide
  modified_base 20: mod_base = OTHER; note = misc_feature - bicyclic nucleic acid scaffold modification
  source 1..20: mol_type = other RNA
tatgagtttcttccaaagca

SEQ ID NO: 1235 - RNA, 20 nt, synthetic construct
  modified_base 1: mod_base = OTHER; note = thymine
  misc_feature 1..20: note = Antisense oligonucleotide
  modified_base 1: mod_base = OTHER; note = misc_feature - bicyclic nucleic acid scaffold modification
  modified_base 20: mod_base = OTHER; note = misc_feature - bicyclic nucleic acid scaffold modification
  source 1..20: mol_type = other RNA
tatgagtttcttccaaagca

SEQ ID NO: 1236 - RNA, 20 nt, synthetic construct
  modified_base 1: mod_base = OTHER; note = thymine
  misc_feature 1..20: note = Antisense oligonucleotide
  modified_base 1..2: mod_base = OTHER; note = misc_feature - bicyclic nucleic acid scaffold modification
  source 1..20: mol_type = other RNA
tatgagtttcttccaaagca

SEQ ID NO: 1237 - RNA, 20 nt, synthetic construct
  misc_feature 1..20: note = Antisense oligonucleotide
  modified_base 19..20: mod_base = OTHER; note = misc_feature - bicyclic nucleic acid scaffold modification
  source 1..20: mol_type = other RNA
tatgagtttcttccaaagca

SEQ ID NO: 1238 - RNA, 18 nt, synthetic construct
  misc_feature 1..18: note = Antisense oligonucleotide
  source 1..18: mol_type = other RNA
tatgagtttcttccaaag

SEQ ID NO: 1239 - RNA, 18 nt, synthetic construct
  modified_base 1: mod_base = OTHER; note = thymine
  misc_feature 1..18: note = Antisense oligonucleotide
  modified_base 1: mod_base = OTHER; note = misc_feature - bicyclic nucleic acid scaffold modification
  source 1..18: mol_type = other RNA
tatgagtttcttccaaag

SEQ ID NO: 1240 - RNA, 18 nt, synthetic construct
  misc_feature 1..18: note = Antisense oligonucleotide
  modified_base 18: mod_base = OTHER; note = misc_feature - bicyclic nucleic acid scaffold modification
  source 1..18: mol_type = other RNA
tatgagtttcttccaaag

SEQ ID NO: 1241 - RNA, 18 nt, synthetic construct
  modified_base 1: mod_base = OTHER; note = thymine
  misc_feature 1..18: note = Antisense oligonucleotide
  modified_base 1: mod_base = OTHER; note = misc_feature - bicyclic nucleic acid scaffold modification
  modified_base 18: mod_base = OTHER; note = misc_feature - bicyclic nucleic acid scaffold modification
  source 1..18: mol_type = other RNA
tatgagtttcttccaaag

SEQ ID NO: 1242 - RNA, 18 nt, synthetic construct
  modified_base 1: mod_base = OTHER; note = thymine
  misc_feature 1..18: note = Antisense oligonucleotide
  modified_base 1..2: mod_base = OTHER; note = misc_feature - bicyclic nucleic acid scaffold modification
  source 1..18: mol_type = other RNA
tatgagtttcttccaaag

SEQ ID NO: 1243 - RNA, 18 nt, synthetic construct
  misc_feature 1..18: note = Antisense oligonucleotide
  modified_base 17..18: mod_base = OTHER; note = misc_feature - bicyclic nucleic acid scaffold modification
  source 1..18: mol_type = other RNA
tatgagtttcttccaaag

SEQ ID NO: 1244 - RNA, 16 nt, synthetic construct
  misc_feature 1..16: note = Antisense oligonucleotide
  source 1..16: mol_type = other RNA
tatgagtttcttccaa

SEQ ID NO: 1245 - RNA, 16 nt, synthetic construct
  modified_base 1: mod_base = OTHER; note = thymine
  misc_feature 1..16: note = Antisense oligonucleotide
  modified_base 1: mod_base = OTHER; note = misc_feature - bicyclic nucleic acid scaffold modification
  source 1..16: mol_type = other RNA
tatgagtttcttccaa

SEQ ID NO: 1246 - RNA, 16 nt, synthetic construct
  modified_base 1: mod_base = OTHER; note = thymine
  misc_feature 1..16: note = Antisense oligonucleotide
  modified_base 16: mod_base = OTHER; note = misc_feature - bicyclic nucleic acid scaffold modification
  source 1..16: mol_type = other RNA
tatgagtttcttccaa

SEQ ID NO: 1247 - RNA, 16 nt, synthetic construct
  misc_feature 1..16: note = Antisense oligonucleotide
  modified_base 1: mod_base = OTHER; note = misc_feature - bicyclic nucleic acid scaffold modification
  modified_base 16: mod_base = OTHER; note = misc_feature - bicyclic nucleic acid scaffold modification
  source 1..16: mol_type = other RNA
tatgagtttcttccaa

SEQ ID NO: 1248 - RNA, 16 nt, synthetic construct
  modified_base 1: mod_base = OTHER; note = thymine
  misc_feature 1..16: note = Antisense oligonucleotide
  modified_base 1..2: mod_base = OTHER; note = misc_feature - bicyclic nucleic acid scaffold modification
  source 1..16: mol_type = other RNA
tatgagtttcttccaa

SEQ ID NO: 1249 - RNA, 16 nt, synthetic construct
  misc_feature 1..16: note = Antisense oligonucleotide
  modified_base 15..16: mod_base = OTHER; note = misc_feature - bicyclic nucleic acid scaffold modification
  source 1..16: mol_type = other RNA
tatgagtttcttccaa

SEQ ID NO: 1250 - RNA, 22 nt, synthetic construct
  misc_feature 1..22: note = Antisense oligonucleotide
  source 1..22: mol_type = other RNA
gagtttcttccaaagcagcctc

SEQ ID NO: 1251 - RNA, 22 nt, synthetic construct
  misc_feature 1..22: note = Antisense oligonucleotide
  modified_base 1: mod_base = OTHER; note = misc_feature - bicyclic nucleic acid scaffold modification
  source 1..22: mol_type = other RNA
gagtttcttccaaagcagcctc

SEQ ID NO: 1252 - RNA, 22 nt, synthetic construct
  misc_feature 1..22: note = Antisense oligonucleotide
  modified_base 22: mod_base = OTHER; note = misc_feature - bicyclic nucleic acid scaffold modification
  source 1..22: mol_type = other RNA
gagtttcttccaaagcagcctc

SEQ ID NO: 1253 - RNA, 22 nt, synthetic construct
  misc_feature 1..22: note = Antisense oligonucleotide
  modified_base 1: mod_base = OTHER; note = misc_feature - bicyclic nucleic acid scaffold modification
  modified_base 22: mod_base = OTHER; note = misc_feature - bicyclic nucleic acid scaffold modification
  source 1..22: mol_type = other RNA
gagtttcttccaaagcagcctc

SEQ ID NO: 1254 - RNA, 22 nt, synthetic construct
  misc_feature 1..22: note = Antisense oligonucleotide
  modified_base 1..2: mod_base = OTHER; note = misc_feature - bicyclic nucleic acid scaffold modification
  source 1..22: mol_type = other RNA
gagtttcttccaaagcagcctc

SEQ ID NO: 1255 - RNA, 22 nt, synthetic construct
  modified_base 21: mod_base = OTHER; note = thymine
  misc_feature 1..22: note = Antisense oligonucleotide
  modified_base 21..22: mod_base = OTHER; note = misc_feature - bicyclic nucleic acid scaffold modification
  source 1..22: mol_type = other RNA
gagtttcttccaaagcagcctc

SEQ ID NO: 1256 - RNA, 20 nt, synthetic construct
  misc_feature 1..20: note = Antisense oligonucleotide
  source 1..20: mol_type = other RNA
gtttcttccaaagcagcctc

SEQ ID NO: 1257 - RNA, 20 nt, synthetic construct
  misc_feature 1..20: note = Antisense oligonucleotide
  modified_base 1: mod_base = OTHER; note = misc_feature - bicyclic nucleic acid scaffold modification
  source 1..20: mol_type = other RNA
gtttcttccaaagcagcctc

SEQ ID NO: 1258 - RNA, 20 nt, synthetic construct
  misc_feature 1..20: note = Antisense oligonucleotide
  modified_base 20: mod_base = OTHER; note = misc_feature - bicyclic nucleic acid scaffold modification
  source 1..20: mol_type = other RNA
gtttcttccaaagcagcctc

SEQ ID NO: 1259 - RNA, 20 nt, synthetic construct
  misc_feature 1..20: note = Antisense oligonucleotide
  modified_base 1: mod_base = OTHER; note = misc_feature - bicyclic nucleic acid scaffold modification
  modified_base 20: mod_base = OTHER; note = misc_feature - bicyclic nucleic acid scaffold modification
  source 1..20: mol_type = other RNA
gtttcttccaaagcagcctc

SEQ ID NO: 1260 - RNA, 20 nt, synthetic construct
  modified_base 2: mod_base = OTHER; note = thymine
  misc_feature 1..20: note = Antisense oligonucleotide
  modified_base 1..2: mod_base = OTHER; note = misc_feature - bicyclic nucleic acid scaffold modification
  source 1..20: mol_type = other RNA
gtttcttccaaagcagcctc

SEQ ID NO: 1261 - RNA, 20 nt, synthetic construct
  modified_base 19: mod_base = OTHER; note = thymine
  misc_feature 1..20: note = Antisense oligonucleotide
  modified_base 19..20: mod_base = OTHER; note = misc_feature - bicyclic nucleic acid scaffold modification
  source 1..20: mol_type = other RNA
gtttcttccaaagcagcctc

SEQ ID NO: 1262 - RNA, 18 nt, synthetic construct
  misc_feature 1..18: note = Antisense oligonucleotide
  source 1..18: mol_type = other RNA
ttcttccaaagcagcctc

SEQ ID NO: 1263 - RNA, 18 nt, synthetic construct
  modified_base 1: mod_base = OTHER; note = thymine
  misc_feature 1..18: note = Antisense oligonucleotide
  modified_base 1: mod_base = OTHER; note = misc_feature - bicyclic nucleic acid scaffold modification
  source 1..18: mol_type = other RNA
ttcttccaaagcagcctc

SEQ ID NO: 1264 - RNA, 18 nt, synthetic construct
  misc_feature 1..18: note = Antisense oligonucleotide
  modified_base 18: mod_base = OTHER; note = misc_feature - bicyclic nucleic acid scaffold modification
  source 1..18: mol_type = other RNA
ttcttccaaagcagcctc

SEQ ID NO: 1265 - RNA, 18 nt, synthetic construct
  modified_base 1: mod_base = OTHER; note = thymine
  misc_feature 1..18: note = Antisense oligonucleotide
  modified_base 1: mod_base = OTHER; note = misc_feature - bicyclic nucleic acid scaffold modification
  modified_base 18: mod_base = OTHER; note = misc_feature - bicyclic nucleic acid scaffold modification
  source 1..18: mol_type = other RNA
ttcttccaaagcagcctc

SEQ ID NO: 1266 - RNA, 18 nt, synthetic construct
  modified_base 1..2: mod_base = OTHER; note = thymine
  misc_feature 1..18: note = Antisense oligonucleotide
  modified_base 1..2: mod_base = OTHER; note = misc_feature - bicyclic nucleic acid scaffold modification
  source 1..18: mol_type = other RNA
ttcttccaaagcagcctc

SEQ ID NO: 1267 - RNA, 18 nt, synthetic construct
  modified_base 17: mod_base = OTHER; note = thymine
  misc_feature 1..18: note = Antisense oligonucleotide
  modified_base 17..18: mod_base = OTHER; note = misc_feature - bicyclic nucleic acid scaffold modification
  source 1..18: mol_type = other RNA
ttcttccaaagcagcctc

SEQ ID NO: 1268 - RNA, 16 nt, synthetic construct
  misc_feature 1..16: note = Antisense oligonucleotide
  source 1..16: mol_type = other RNA
cttccaaagcagcctc

SEQ ID NO: 1269 - RNA, 16 nt, synthetic construct
  misc_feature 1..16: note = Antisense oligonucleotide
  modified_base 1: mod_base = OTHER; note = misc_feature - bicyclic nucleic acid scaffold modification
  source 1..16: mol_type = other RNA
cttccaaagcagcctc

SEQ ID NO: 1270 - RNA, 16 nt, synthetic construct
  misc_feature 1..16: note = Antisense oligonucleotide
  modified_base 16: mod_base = OTHER; note = misc_feature - bicyclic nucleic acid scaffold modification
  source 1..16: mol_type = other RNA
cttccaaagcagcctc

SEQ ID NO: 1271 - RNA, 16 nt, synthetic construct
  misc_feature 1..16: note = Antisense oligonucleotide
  modified_base 1: mod_base = OTHER; note = misc_feature - bicyclic nucleic acid scaffold modification
  modified_base 16: mod_base = OTHER; note = misc_feature - bicyclic nucleic acid scaffold modification
  source 1..16: mol_type = other RNA
cttccaaagcagcctc

SEQ ID NO: 1272 - RNA, 16 nt, synthetic construct
  modified_base 2: mod_base = OTHER; note = thymine
  misc_feature 1..16: note = Antisense oligonucleotide
  modified_base 1..2: mod_base = OTHER; note = misc_feature - bicyclic nucleic acid scaffold modification
  source 1..16: mol_type = other RNA
cttccaaagcagcctc

SEQ ID NO: 1273 - RNA, 16 nt, synthetic construct
  modified_base 15: mod_base = OTHER; note = thymine
  misc_feature 1..16: note = Antisense oligonucleotide
  modified_base 15..16: mod_base = OTHER; note = misc_feature - bicyclic nucleic acid scaffold modification
  source 1..16: mol_type = other RNA
cttccaaagcagcctc

SEQ ID NO: 1274 - RNA, 18 nt, synthetic construct
  misc_feature 1..18: note = Antisense oligonucleotide
  source 1..18: mol_type = other RNA
gagtttcttccaaagcag

SEQ ID NO: 1275 - RNA, 18 nt, synthetic construct
  misc_feature 1..18: note = Antisense oligonucleotide
  modified_base 1: mod_base = OTHER; note = misc_feature - bicyclic nucleic acid scaffold modification
  source 1..18: mol_type = other RNA
gagtttcttccaaagcag

SEQ ID NO: 1276 - RNA, 18 nt, synthetic construct
  misc_feature 1..18: note = Antisense oligonucleotide
  modified_base 18: mod_base = OTHER; note = misc_feature - bicyclic nucleic acid scaffold modification
  source 1..18: mol_type = other RNA
gagtttcttccaaagcag

SEQ ID NO: 1277 - RNA, 18 nt, synthetic construct
  misc_feature 1..18: note = Antisense oligonucleotide
  modified_base 1: mod_base = OTHER; note = misc_feature - bicyclic nucleic acid scaffold modification
  modified_base 18: mod_base = OTHER; note = misc_feature - bicyclic nucleic acid scaffold modification
  source 1..18: mol_type = other RNA
gagtttcttccaaagcag

SEQ ID NO: 1278 - RNA, 18 nt, synthetic construct
  misc_feature 1..18: note = Antisense oligonucleotide
  modified_base 1..2: mod_base = OTHER; note = misc_feature - bicyclic nucleic acid scaffold modification
  source 1..18: mol_type = other RNA
gagtttcttccaaagcag

SEQ ID NO: 1279 - RNA, 18 nt, synthetic construct
  misc_feature 1..18: note = Antisense oligonucleotide
  modified_base 17..18: mod_base = OTHER; note = misc_feature - bicyclic nucleic acid scaffold modification
  source 1..18: mol_type = other RNA
gagtttcttccaaagcag

SEQ ID NO: 1280 - RNA, 24 nt, synthetic construct
  misc_feature 1..24: note = Antisense oligonucleotide
  source 1..24: mol_type = other RNA
agcatcctgtaggacattggcagt

SEQ ID NO: 1281 - RNA, 24 nt, synthetic construct
  misc_feature 1..24: note = Antisense oligonucleotide
  modified_base 1: mod_base = OTHER; note = misc_feature - bicyclic nucleic acid scaffold modification
  source 1..24: mol_type = other RNA
agcatcctgtaggacattggcagt

SEQ ID NO: 1282 - RNA, 24 nt, synthetic construct
  modified_base 24: mod_base = OTHER; note = thymine
  misc_feature 1..24: note = Antisense oligonucleotide
  modified_base 24: mod_base = OTHER; note = misc_feature - bicyclic nucleic acid scaffold modification
  source 1..24: mol_type = other RNA
agcatcctgtaggacattggcagt

SEQ ID NO: 1283 - RNA, 24 nt, synthetic construct
  modified_base 24: mod_base = OTHER; note = thymine
  misc_feature 1..24: note = Antisense oligonucleotide
  modified_base 1: mod_base = OTHER; note = misc_feature - bicyclic nucleic acid scaffold modification
  modified_base 24: mod_base = OTHER; note = misc_feature - bicyclic nucleic acid scaffold modification
  source 1..24: mol_type = other RNA
agcatcctgtaggacattggcagt

SEQ ID NO: 1284 - RNA, 24 nt, synthetic construct
  misc_feature 1..24: note = Antisense oligonucleotide
  modified_base 1..2: mod_base = OTHER; note = misc_feature - bicyclic nucleic acid scaffold modification
  source 1..24: mol_type = other RNA
agcatcctgtaggacattggcagt

SEQ ID NO: 1285 - RNA, 24 nt, synthetic construct
  modified_base 24: mod_base = OTHER; note = thymine
  misc_feature 1..24: note = Antisense oligonucleotide
  modified_base 23..24: mod_base = OTHER; note = misc_feature - bicyclic nucleic acid scaffold modification
  source 1..24: mol_type = other RNA
agcatcctgtaggacattggcagt

SEQ ID NO: 1286 - RNA, 22 nt, synthetic construct
  misc_feature 1..22: note = Antisense oligonucleotide
  source 1..22: mol_type = other RNA
agcatcctgtaggacattggca

SEQ ID NO: 1287 - RNA, 22 nt, synthetic construct
  misc_feature 1..22: note = Antisense oligonucleotide
  modified_base 1: mod_base = OTHER; note = misc_feature - bicyclic nucleic acid scaffold modification
  source 1..22: mol_type = other RNA
agcatcctgtaggacattggca

SEQ ID NO: 1288 - RNA, 22 nt, synthetic construct
  misc_feature 1..22: note = Antisense oligonucleotide
  modified_base 22: mod_base = OTHER; note = misc_feature - bicyclic nucleic acid scaffold modification
  source 1..22: mol_type = other RNA
agcatcctgtaggacattggca

SEQ ID NO: 1289 - RNA, 22 nt, synthetic construct
  misc_feature 1..22: note = Antisense oligonucleotide
  modified_base 1: mod_base = OTHER; note = misc_feature - bicyclic nucleic acid scaffold modification
  modified_base 22: mod_base = OTHER; note = misc_feature - bicyclic nucleic acid scaffold modification
  source 1..22: mol_type = other RNA
agcatcctgtaggacattggca

SEQ ID NO: 1290 - RNA, 22 nt, synthetic construct
  misc_feature 1..22: note = Antisense oligonucleotide
  modified_base 1..2: mod_base = OTHER; note = misc_feature - bicyclic nucleic acid scaffold modification
  source 1..22: mol_type = other RNA
agcatcctgtaggacattggca

SEQ ID NO: 1291 - RNA, 22 nt, synthetic construct
  misc_feature 1..22: note = Antisense oligonucleotide
  modified_base 21..22: mod_base = OTHER; note = misc_feature - bicyclic nucleic acid scaffold modification
  source 1..22: mol_type = other RNA
agcatcctgtaggacattggca

SEQ ID NO: 1292 - RNA, 20 nt, synthetic construct
  misc_feature 1..20: note = Antisense oligonucleotide
  source 1..20: mol_type = other RNA
agcatcctgtaggacattgg

SEQ ID NO: 1293 - RNA, 20 nt, synthetic construct
  misc_feature 1..20: note = Antisense oligonucleotide
  modified_base 1: mod_base = OTHER; note = misc_feature - bicyclic nucleic acid scaffold modification
  source 1..20: mol_type = other RNA
agcatcctgtaggacattgg

SEQ ID NO: 1294 - RNA, 20 nt, synthetic construct
  misc_feature 1..20: note = Antisense oligonucleotide
  modified_base 20: mod_base = OTHER; note = misc_feature - bicyclic nucleic acid scaffold modification
  source 1..20: mol_type = other RNA
agcatcctgtaggacattgg

SEQ ID NO: 1295 - RNA, 20 nt, synthetic construct
  misc_feature 1..20: note = Antisense oligonucleotide
  modified_base 1: mod_base = OTHER; note = misc_feature - bicyclic nucleic acid scaffold modification
  modified_base 20: mod_base = OTHER; note = misc_feature - bicyclic nucleic acid scaffold modification
  source 1..20: mol_type = other RNA
agcatcctgtaggacattgg

SEQ ID NO: 1296 - RNA, 20 nt, synthetic construct
  misc_feature 1..20: note = Antisense oligonucleotide
  modified_base 1..2: mod_base = OTHER; note = misc_feature - bicyclic nucleic acid scaffold modification
  source 1..20: mol_type = other RNA
agcatcctgtaggacattgg

SEQ ID NO: 1297 - RNA, 20 nt, synthetic construct
  misc_feature 1..20: note = Antisense oligonucleotide
  modified_base 19..20: mod_base = OTHER; note = misc_feature - bicyclic nucleic acid scaffold modification
  source 1..20: mol_type = other RNA
agcatcctgtaggacattgg

SEQ ID NO: 1298 - RNA, 18 nt, synthetic construct
  misc_feature 1..18: note = Antisense oligonucleotide
  source 1..18: mol_type = other RNA
agcatcctgtaggacatt

SEQ ID NO: 1299 - RNA, 18 nt, synthetic construct
  misc_feature 1..18: note = Antisense oligonucleotide
  modified_base 1: mod_base = OTHER; note = misc_feature - bicyclic nucleic acid scaffold modification
  source 1..18: mol_type = other RNA
agcatcctgtaggacatt

SEQ ID NO: 1300 - RNA, 18 nt, synthetic construct
  modified_base 18: mod_base = OTHER; note = thymine
  misc_feature 1..18: note = Antisense oligonucleotide
  modified_base 18: mod_base = OTHER; note = misc_feature - bicyclic nucleic acid scaffold modification
  source 1..18: mol_type = other RNA
agcatcctgtaggacatt

SEQ ID NO: 1301 - RNA, 18 nt, synthetic construct
  modified_base 18: mod_base = OTHER; note = thymine
  misc_feature 1..18: note = Antisense oligonucleotide
  modified_base 1: mod_base = OTHER; note = misc_feature - bicyclic nucleic acid scaffold modification
  modified_base 18: mod_base = OTHER; note = misc_feature - bicyclic nucleic acid scaffold modification
  source 1..18: mol_type = other RNA
agcatcctgtaggacatt

SEQ ID NO: 1302 - RNA, 18 nt, synthetic construct
  misc_feature 1..18: note = Antisense oligonucleotide
  modified_base 1..2: mod_base = OTHER; note = misc_feature - bicyclic nucleic acid scaffold modification
  source 1..18: mol_type = other RNA
agcatcctgtaggacatt

SEQ ID NO: 1303 - RNA, 18 nt, synthetic construct
  modified_base 17..18: mod_base = OTHER; note = thymine
  misc_feature 1..18: note = Antisense oligonucleotide
  modified_base 17..18: mod_base = OTHER; note = misc_feature - bicyclic nucleic acid scaffold modification
  source 1..18: mol_type = other RNA
agcatcctgtaggacatt

SEQ ID NO: 1304 - RNA, 16 nt, synthetic construct
  misc_feature 1..16: note = Antisense oligonucleotide
  source 1..16: mol_type = other RNA
agcatcctgtaggaca

SEQ ID NO: 1305 - RNA, 16 nt, synthetic construct
  misc_feature 1..16: note = Antisense oligonucleotide
  modified_base 1: mod_base = OTHER; note = misc_feature - bicyclic nucleic acid scaffold modification
  source 1..16: mol_type = other RNA
agcatcctgtaggaca

SEQ ID NO: 1306 - RNA, 16 nt, synthetic construct
  misc_feature 1..16: note = Antisense oligonucleotide
  modified_base 16: mod_base = OTHER; note = misc_feature - bicyclic nucleic acid scaffold modification
  source 1..16: mol_type = other RNA
agcatcctgtaggaca

SEQ ID NO: 1307 - RNA, 16 nt, synthetic construct
  misc_feature 1..16: note = Antisense oligonucleotide
  modified_base 1: mod_base = OTHER; note = misc_feature - bicyclic nucleic acid scaffold modification
  modified_base 16: mod_base = OTHER; note = misc_feature - bicyclic nucleic acid scaffold modification
  source 1..16: mol_type = other RNA
agcatcctgtaggaca

SEQ ID NO: 1308 - RNA, 16 nt, synthetic construct
  misc_feature 1..16: note = Antisense oligonucleotide
  modified_base 1..2: mod_base = OTHER; note = misc_feature - bicyclic nucleic acid scaffold modification
  source 1..16: mol_type = other RNA
agcatcctgtaggaca

SEQ ID NO: 1309 - RNA, 16 nt, synthetic construct
  misc_feature 1..16: note = Antisense oligonucleotide
  modified_base 15..16: mod_base = OTHER; note = misc_feature - bicyclic nucleic acid scaffold modification
  source 1..16: mol_type = other RNA
agcatcctgtaggaca

SEQ ID NO: 1310 - RNA, 22 nt, synthetic construct
  misc_feature 1..22: note = Antisense oligonucleotide
  source 1..22: mol_type = other RNA
catcctgtaggacattggcagt

SEQ ID NO: 1311 - RNA, 22 nt, synthetic construct
  misc_feature 1..22: note = Antisense oligonucleotide
  modified_base 1: mod_base = OTHER; note = misc_feature - bicyclic nucleic acid scaffold modification
  source 1..22: mol_type = other RNA
catcctgtaggacattggcagt

SEQ ID NO: 1312 - RNA, 22 nt, synthetic construct
  modified_base 22: mod_base = OTHER; note = thymine
  misc_feature 1..22: note = Antisense oligonucleotide
  modified_base 22: mod_base = OTHER; note = misc_feature - bicyclic nucleic acid scaffold modification
  source 1..22: mol_type = other RNA
catcctgtaggacattggcagt

SEQ ID NO: 1313 - RNA, 22 nt, synthetic construct
  modified_base 22: mod_base = OTHER; note = thymine
  misc_feature 1..22: note = Antisense oligonucleotide
  modified_base 1: mod_base = OTHER; note = misc_feature - bicyclic nucleic acid scaffold modification
  modified_base 22: mod_base = OTHER; note = misc_feature - bicyclic nucleic acid scaffold modification
  source 1..22: mol_type = other RNA
catcctgtaggacattggcagt

SEQ ID NO: 1314 - RNA, 22 nt, synthetic construct
  misc_feature 1..22: note = Antisense oligonucleotide
  modified_base 1..2: mod_base = OTHER; note = misc_feature - bicyclic nucleic acid scaffold modification
  source 1..22: mol_type = other RNA
catcctgtaggacattggcagt

SEQ ID NO: 1315 - RNA, 22 nt, synthetic construct
  modified_base 22: mod_base = OTHER; note = thymine
  misc_feature 1..22: note = Antisense oligonucleotide
  modified_base 21..22: mod_base = OTHER; note = misc_feature - bicyclic nucleic acid scaffold modification
  source 1..22: mol_type = other RNA
catcctgtaggacattggcagt

SEQ ID NO: 1316 - RNA, 20 nt, synthetic construct
  misc_feature 1..20: note = Antisense oligonucleotide
  source 1..20: mol_type = other RNA
tcctgtaggacattggcagt

SEQ ID NO: 1317 - RNA, 20 nt, synthetic construct
  modified_base 1: mod_base = OTHER; note = thymine
  misc_feature 1..20: note = Antisense oligonucleotide
  modified_base 1: mod_base = OTHER; note = misc_feature - bicyclic nucleic acid scaffold modification
  source 1..20: mol_type = other RNA
tcctgtaggacattggcagt

SEQ ID NO: 1318 - RNA, 20 nt, synthetic construct
  modified_base 20: mod_base = OTHER; note = thymine
  misc_feature 1..20: note = Antisense oligonucleotide
  modified_base 20: mod_base = OTHER; note = misc_feature - bicyclic nucleic acid scaffold modification
  source 1..20: mol_type = other RNA
tcctgtaggacattggcagt

SEQ ID NO: 1319 - RNA, 20 nt, synthetic construct
  modified_base 1: mod_base = OTHER; note = thymine
  modified_base 20: mod_base = OTHER; note = thymine
  misc_feature 1..20: note = Antisense oligonucleotide
  modified_base 1: mod_base = OTHER; note = misc_feature - bicyclic nucleic acid scaffold modification
  modified_base 20: mod_base = OTHER; note = misc_feature - bicyclic nucleic acid scaffold modification
  source 1..20: mol_type = other RNA
tcctgtaggacattggcagt

SEQ ID NO: 1320 - RNA, 20 nt, synthetic construct
  modified_base 1: mod_base = OTHER; note = thymine
  misc_feature 1..20: note = Antisense oligonucleotide
  modified_base 1..2: mod_base = OTHER; note = misc_feature - bicyclic nucleic acid scaffold modification
  source 1..20: mol_type = other RNA
tcctgtaggacattggcagt

SEQ ID NO: 1321 - RNA, 20 nt, synthetic construct
  modified_base 20: mod_base = OTHER; note = thymine
  misc_feature 1..20: note = Antisense oligonucleotide
  modified_base 19..20: mod_base = OTHER; note = misc_feature - bicyclic nucleic acid scaffold modification
  source 1..20: mol_type = other RNA
tcctgtaggacattggcagt

SEQ ID NO: 1322 - RNA, 18 nt, synthetic construct
  misc_feature 1..18: note = Antisense oligonucleotide
  source 1..18: mol_type = other RNA
ctgtaggacattggcagt

SEQ ID NO: 1323 - RNA, 18 nt, synthetic construct
  misc_feature 1..18: note = Antisense oligonucleotide
  modified_base 1: mod_base = OTHER; note = misc_feature - bicyclic nucleic acid scaffold modification
  source 1..18: mol_type = other RNA
ctgtaggacattggcagt

SEQ ID NO: 1324 - RNA, 18 nt, synthetic construct
  modified_base 18: mod_base = OTHER; note = thymine
  misc_feature 1..18: note = Antisense oligonucleotide
  modified_base 18: mod_base = OTHER; note = misc_feature - bicyclic nucleic acid scaffold modification
  source 1..18: mol_type = other RNA
ctgtaggacattggcagt

SEQ ID NO: 1325 - RNA, 18 nt, synthetic construct
  modified_base 18: mod_base = OTHER; note = thymine
  misc_feature 1..18: note = Antisense oligonucleotide
  modified_base 1: mod_base = OTHER; note = misc_feature - bicyclic nucleic acid scaffold modification
  modified_base 18: mod_base = OTHER; note = misc_feature - bicyclic nucleic acid scaffold modification
  source 1..18: mol_type = other RNA
ctgtaggacattggcagt

SEQ ID NO: 1326 - RNA, 18 nt, synthetic construct
  modified_base 2: mod_base = OTHER; note = thymine
  misc_feature 1..18: note = Antisense oligonucleotide
  modified_base 1..2: mod_base = OTHER; note = misc_feature - bicyclic nucleic acid scaffold modification
  source 1..18: mol_type = other RNA
ctgtaggacattggcagt

SEQ ID NO: 1327 - RNA, 18 nt, synthetic construct
  modified_base 18: mod_base = OTHER; note = thymine
  misc_feature 1..18: note = Antisense oligonucleotide
  modified_base 17..18: mod_base = OTHER; note = misc_feature - bicyclic nucleic acid scaffold modification
  source 1..18: mol_type = other RNA
ctgtaggacattggcagt

SEQ ID NO: 1328 - RNA, 16 nt, synthetic construct
  misc_feature 1..16: note = Antisense oligonucleotide
  source 1..16: mol_type = other RNA
gtaggacattggcagt

SEQ ID NO: 1329 - RNA, 16 nt, synthetic construct
  misc_feature 1..16: note = Antisense oligonucleotide
  modified_base 1: mod_base = OTHER; note = misc_feature - bicyclic nucleic acid scaffold modification
  source 1..16: mol_type = other RNA
gtaggacattggcagt

SEQ ID NO: 1330 - RNA, 16 nt, synthetic construct
  modified_base 16: mod_base = OTHER; note = thymine
  misc_feature 1..16: note = Antisense oligonucleotide
  modified_base 16: mod_base = OTHER; note = misc_feature - bicyclic nucleic acid scaffold modification
  source 1..16: mol_type = other RNA
gtaggacattggcagt

SEQ ID NO: 1331 - RNA, 16 nt, synthetic construct
  modified_base 16: mod_base = OTHER; note = thymine
  misc_feature 1..16: note = Antisense oligonucleotide
  modified_base 1: mod_base = OTHER; note = misc_feature - bicyclic nucleic acid scaffold modification
  modified_base 16: mod_base = OTHER; note = misc_feature - bicyclic nucleic acid scaffold modification
  source 1..16: mol_type = other RNA
gtaggacattggcagt

SEQ ID NO: 1332 - RNA, 16 nt, synthetic construct
  modified_base 2: mod_base = OTHER; note = thymine
  misc_feature 1..16: note = Antisense oligonucleotide
  modified_base 1..2: mod_base = OTHER; note = misc_feature - bicyclic nucleic acid scaffold modification
  source 1..16: mol_type = other RNA
gtaggacattggcagt

SEQ ID NO: 1333 - RNA, 16 nt, synthetic construct
  modified_base 16: mod_base = OTHER; note = thymine
  misc_feature 1..16: note = Antisense oligonucleotide
  modified_base 15..16: mod_base = OTHER; note = misc_feature - bicyclic nucleic acid scaffold modification
  source 1..16: mol_type = other RNA
gtaggacattggcagt

SEQ ID NO: 1334 - RNA, 18 nt, synthetic construct
  misc_feature 1..18: note = Antisense oligonucleotide
  source 1..18: mol_type = other RNA
atcctgtaggacattggc

SEQ ID NO: 1335 - RNA, 18 nt, synthetic construct
  misc_feature 1..18: note = Antisense oligonucleotide
  modified_base 1: mod_base = OTHER; note = misc_feature - bicyclic nucleic acid scaffold modification
  source 1..18: mol_type = other RNA
atcctgtaggacattggc

SEQ ID NO: 1336 - RNA, 18 nt, synthetic construct
  misc_feature 1..18: note = Antisense oligonucleotide
  modified_base 18: mod_base = OTHER; note = misc_feature - bicyclic nucleic acid scaffold modification
  source 1..18: mol_type = other RNA
atcctgtaggacattggc

SEQ ID NO: 1337 - RNA, 18 nt, synthetic construct
  misc_feature 1..18: note = Antisense oligonucleotide
  modified_base 1: mod_base = OTHER; note = misc_feature - bicyclic nucleic acid scaffold modification
  modified_base 18: mod_base = OTHER; note = misc_feature - bicyclic nucleic acid scaffold modification
  source 1..18: mol_type = other RNA
atcctgtaggacattggc

SEQ ID NO: 1338 - RNA, 18 nt, synthetic construct
  modified_base 2: mod_base = OTHER; note = thymine
  misc_feature 1..18: note = Antisense oligonucleotide
  modified_base 1..2: mod_base = OTHER; note = misc_feature - bicyclic nucleic acid scaffold modification
  source 1..18: mol_type = other RNA
atcctgtaggacattggc

SEQ ID NO: 1339 - RNA, 18 nt, synthetic construct
  misc_feature 1..18: note = Antisense oligonucleotide
  modified_base 17..18: mod_base = OTHER; note = misc_feature - bicyclic nucleic acid scaffold modification
  source 1..18: mol_type = other RNA
atcctgtaggacattggc

SEQ ID NO: 1340 - RNA, 24 nt, synthetic construct
  misc_feature 1..24: note = Antisense oligonucleotide
  source 1..24: mol_type = other RNA
ctgtaggacattggcagttgtttc

SEQ ID NO: 1341 - RNA, 24 nt, synthetic construct
  misc_feature 1..24: note = Antisense oligonucleotide
  modified_base 1: mod_base = OTHER; note = misc_feature - bicyclic nucleic acid scaffold modification
  source 1..24: mol_type = other RNA
ctgtaggacattggcagttgtttc

SEQ ID NO: 1342 - RNA, 24 nt, synthetic construct
  misc_feature 1..24: note = Antisense oligonucleotide
  modified_base 24: mod_base = OTHER; note = misc_feature - bicyclic nucleic acid scaffold modification
  source 1..24: mol_type = other RNA
ctgtaggacattggcagttgtttc

SEQ ID NO: 1343 - RNA, 24 nt, synthetic construct
  misc_feature 1..24: note = Antisense oligonucleotide
  modified_base 1: mod_base = OTHER; note = misc_feature - bicyclic nucleic acid scaffold modification
  modified_base 24: mod_base = OTHER; note = misc_feature - bicyclic nucleic acid scaffold modification
  source 1..24: mol_type = other RNA
ctgtaggacattggcagttgtttc

SEQ ID NO: 1344 - RNA, 24 nt, synthetic construct
  modified_base 2: mod_base = OTHER; note = thymine
  misc_feature 1..24: note = Antisense oligonucleotide
  modified_base 1..2: mod_base = OTHER; note = misc_feature - bicyclic nucleic acid scaffold modification
  source 1..24: mol_type = other RNA
ctgtaggacattggcagttgtttc

SEQ ID NO: 1345 - RNA, 24 nt, synthetic construct
  modified_base 23: mod_base = OTHER; note = thymine
  misc_feature 1..24: note = Antisense oligonucleotide
  modified_base 23..24: mod_base = OTHER; note = misc_feature - bicyclic nucleic acid scaffold modification
  source 1..24: mol_type = other RNA
ctgtaggacattggcagttgtttc

SEQ ID NO: 1346 - RNA, 22 nt, synthetic construct
  misc_feature 1..22: note = Antisense oligonucleotide
  source 1..22: mol_type = other RNA
ctgtaggacattggcagttgtt

SEQ ID NO: 1347 - RNA, 22 nt, synthetic construct
  misc_feature 1..22: note = Antisense oligonucleotide
  modified_base 1: mod_base = OTHER; note = misc_feature - bicyclic nucleic acid scaffold modification
  source 1..22: mol_type = other RNA
ctgtaggacattggcagttgtt

SEQ ID NO: 1348 - RNA, 22 nt, synthetic construct
  modified_base 22: mod_base = OTHER; note = thymine
  misc_feature 1..22: note = Antisense oligonucleotide
  modified_base 22: mod_base = OTHER; note = misc_feature - bicyclic nucleic acid scaffold modification
  source 1..22: mol_type = other RNA
ctgtaggacattggcagttgtt

SEQ ID NO: 1349 - RNA, 22 nt, synthetic construct
  modified_base 22: mod_base = OTHER; note = thymine
  misc_feature 1..22: note = Antisense oligonucleotide
  modified_base 1: mod_base = OTHER; note = misc_feature - bicyclic nucleic acid scaffold modification
  modified_base 22: mod_base = OTHER; note = misc_feature - bicyclic nucleic acid scaffold modification
  source 1..22: mol_type = other RNA
ctgtaggacattggcagttgtt

SEQ ID NO: 1350 - RNA, 22 nt, synthetic construct
  modified_base 2: mod_base = OTHER; note = thymine
  misc_feature 1..22: note = Antisense oligonucleotide
  modified_base 1..2: mod_base = OTHER; note = misc_feature - bicyclic nucleic acid scaffold modification
  source 1..22: mol_type = other RNA
ctgtaggacattggcagttgtt

SEQ ID NO: 1351 - RNA, 22 nt, synthetic construct
  modified_base 21..22: mod_base = OTHER; note = thymine
  misc_feature 1..22: note = Antisense oligonucleotide
  modified_base 21..22: mod_base = OTHER; note = misc_feature - bicyclic nucleic acid scaffold modification
  source 1..22: mol_type = other RNA
ctgtaggacattggcagttgtt

SEQ ID NO: 1352 - RNA, 20 nt, synthetic construct
  misc_feature 1..20: note = Antisense oligonucleotide
  source 1..20: mol_type = other RNA
ctgtaggacattggcagttg

SEQ ID NO: 1353 - RNA, 20 nt, synthetic construct
  misc_feature 1..20: note = Antisense oligonucleotide
  modified_base 1: mod_base = OTHER; note = misc_feature - bicyclic nucleic acid scaffold modification
  source 1..20: mol_type = other RNA
ctgtaggacattggcagttg

SEQ ID NO: 1354 - RNA, 20 nt, synthetic construct
  misc_feature 1..20: note = Antisense oligonucleotide
  modified_base 20: mod_base = OTHER; note = misc_feature - bicyclic nucleic acid scaffold modification
  source 1..20: mol_type = other RNA
ctgtaggacattggcagttg

SEQ ID NO: 1355 - RNA, 20 nt, synthetic construct
  misc_feature 1..20: note = Antisense oligonucleotide
  modified_base 1: mod_base = OTHER; note = misc_feature - bicyclic nucleic acid scaffold modification
  modified_base 20: mod_base = OTHER; note = misc_feature - bicyclic nucleic acid scaffold modification
  source 1..20: mol_type = other RNA
ctgtaggacattggcagttg

SEQ ID NO: 1356 - RNA, 20 nt, synthetic construct
  modified_base 2: mod_base = OTHER; note = thymine
  misc_feature 1..20: note = Antisense oligonucleotide
  modified_base 1..2: mod_base = OTHER; note = misc_feature - bicyclic nucleic acid scaffold modification
  source 1..20: mol_type = other RNA
ctgtaggacattggcagttg

SEQ ID NO: 1357 - RNA, 20 nt, synthetic construct
  modified_base 19: mod_base = OTHER; note = thymine
  misc_feature 1..20: note = Antisense oligonucleotide
  modified_base 19..20: mod_base = OTHER; note = misc_feature - bicyclic nucleic acid scaffold modification
  source 1..20: mol_type = other RNA
ctgtaggacattggcagttg

SEQ ID NO: 1358 - RNA, 18 nt, synthetic construct
  misc_feature 1..18: note = Antisense oligonucleotide
  source 1..18: mol_type = other RNA
ctgtaggacattggcagt

SEQ ID NO: 1359 - RNA, 18 nt, synthetic construct
  misc_feature 1..18: note = Antisense oligonucleotide
  modified_base 1: mod_base = OTHER; note = misc_feature - bicyclic nucleic acid scaffold modification
  source 1..18: mol_type = other RNA
ctgtaggacattggcagt

SEQ ID NO: 1360 - RNA, 18 nt, synthetic construct
  modified_base 18: mod_base = OTHER; note = thymine
  misc_feature 1..18: note = Antisense oligonucleotide
  modified_base 18: mod_base = OTHER; note = misc_feature - bicyclic nucleic acid scaffold modification
  source 1..18: mol_type = other RNA
ctgtaggacattggcagt

SEQ ID NO: 1361 - RNA, 18 nt, synthetic construct
  modified_base 18: mod_base = OTHER; note = thymine
  misc_feature 1..18: note = Antisense oligonucleotide
  modified_base 1: mod_base = OTHER; note = misc_feature - bicyclic nucleic acid scaffold modification
  modified_base 18: mod_base = OTHER; note = misc_feature - bicyclic nucleic acid scaffold modification
  source 1..18: mol_type = other RNA
ctgtaggacattggcagt

SEQ ID NO: 1362 - RNA, 18 nt, synthetic construct
  modified_base 2: mod_base = OTHER; note = thymine
  misc_feature 1..18: note = Antisense oligonucleotide
  modified_base 1..2: mod_base = OTHER; note = misc_feature - bicyclic nucleic acid scaffold modification
  source 1..18: mol_type = other RNA
ctgtaggacattggcagt

SEQ ID NO: 1363 - RNA, 18 nt, synthetic construct
  modified_base 18: mod_base = OTHER; note = thymine
  misc_feature 1..18: note = Antisense oligonucleotide
  modified_base 17..18: mod_base = OTHER; note = misc_feature - bicyclic nucleic acid scaffold modification
  source 1..18: mol_type = other RNA
ctgtaggacattggcagt

SEQ ID NO: 1364 - RNA, 16 nt, synthetic construct
  misc_feature 1..16: note = Antisense oligonucleotide
  source 1..16: mol_type = other RNA
ctgtaggacattggca

SEQ ID NO: 1365 - RNA, 16 nt, synthetic construct
  misc_feature 1..16: note = Antisense oligonucleotide
  modified_base 1: mod_base = OTHER; note = misc_feature - bicyclic nucleic acid scaffold modification
  source 1..16: mol_type = other RNA
ctgtaggacattggca

SEQ ID NO: 1366 - RNA, 16 nt, synthetic construct
  misc_feature 1..16: note = Antisense oligonucleotide
  modified_base 16: mod_base = OTHER; note = misc_feature - bicyclic nucleic acid scaffold modification
  source 1..16: mol_type = other RNA
ctgtaggacattggca

SEQ ID NO: 1367 - RNA, 16 nt, synthetic construct
  misc_feature 1..16: note = Antisense oligonucleotide
  modified_base 1: mod_base = OTHER; note = misc_feature - bicyclic nucleic acid scaffold modification
  modified_base 16: mod_base = OTHER; note = misc_feature - bicyclic nucleic acid scaffold modification
  source 1..16: mol_type = other RNA
ctgtaggacattggca

SEQ ID NO: 1368 - RNA, 16 nt, synthetic construct
  modified_base 2: mod_base = OTHER; note = thymine
  misc_feature 1..16: note = Antisense oligonucleotide
  modified_base 1..2: mod_base = OTHER; note = misc_feature - bicyclic nucleic acid scaffold modification
  source 1..16: mol_type = other RNA
ctgtaggacattggca

SEQ ID NO: 1369 - RNA, 16 nt, synthetic construct
  misc_feature 1..16: note = Antisense oligonucleotide
  modified_base 15..16: mod_base = OTHER; note = misc_feature - bicyclic nucleic acid scaffold modification
  source 1..16: mol_type = other RNA
ctgtaggacattggca

SEQ ID NO: 1370 - RNA, 22 nt, synthetic construct
  misc_feature 1..22: note = Antisense oligonucleotide
  source 1..22: mol_type = other RNA
gtaggacattggcagttgtttc

SEQ ID NO: 1371 - RNA, 22 nt, synthetic construct
  misc_feature 1..22: note = Antisense oligonucleotide
  modified_base 1: mod_base = OTHER; note = misc_feature - bicyclic nucleic acid scaffold modification
  source 1..22: mol_type = other RNA
gtaggacattggcagttgtttc

SEQ ID NO: 1372 - RNA, 22 nt, synthetic construct
  misc_feature 1..22: note = Antisense oligonucleotide
  modified_base 22: mod_base = OTHER; note = misc_feature - bicyclic nucleic acid scaffold modification
  source 1..22: mol_type = other RNA
gtaggacattggcagttgtttc

SEQ ID NO: 1373 - RNA, 22 nt, synthetic construct
  misc_feature 1..22: note = Antisense oligonucleotide
  modified_base 1: mod_base = OTHER; note = misc_feature - bicyclic nucleic acid scaffold modification
  modified_base 22: mod_base = OTHER; note = misc_feature - bicyclic nucleic acid scaffold modification
  source 1..22: mol_type = other RNA
gtaggacattggcagttgtttc

SEQ ID NO: 1374 - RNA, 22 nt, synthetic construct
  modified_base 2: mod_base = OTHER; note = thymine
  misc_feature 1..22: note = Antisense oligonucleotide
  modified_base 1..2: mod_base = OTHER; note = misc_feature - bicyclic nucleic acid scaffold modification
  source 1..22: mol_type = other RNA
gtaggacattggcagttgtttc

SEQ ID NO: 1375 - RNA, 22 nt, synthetic construct
  modified_base 21: mod_base = OTHER; note = thymine
  misc_feature 1..22: note = Antisense oligonucleotide
  modified_base 21..22: mod_base = OTHER; note = misc_feature - bicyclic nucleic acid scaffold modification
  source 1..22: mol_type = other RNA
gtaggacattggcagttgtttc

SEQ ID NO: 1376 - RNA, 20 nt, synthetic construct
  misc_feature 1..20: note = Antisense oligonucleotide
  source 1..20: mol_type = other RNA
aggacattggcagttgtttc

SEQ ID NO: 1377 - RNA, 20 nt, synthetic construct
  misc_feature 1..20: note = Antisense oligonucleotide
  modified_base 1: mod_base = OTHER; note = misc_feature - bicyclic nucleic acid scaffold modification
  source 1..20: mol_type = other RNA
aggacattggcagttgtttc

SEQ ID NO: 1378 - RNA, 20 nt, synthetic construct
  misc_feature 1..20: note = Antisense oligonucleotide
  modified_base 20: mod_base = OTHER; note = misc_feature - bicyclic nucleic acid scaffold modification
  source 1..20: mol_type = other RNA
aggacattggcagttgtttc

SEQ ID NO: 1379 - RNA, 20 nt, synthetic construct
  misc_feature 1..20: note = Antisense oligonucleotide
  modified_base 1: mod_base = OTHER; note = misc_feature - bicyclic nucleic acid scaffold modification
  modified_base 20: mod_base = OTHER; note = misc_feature - bicyclic nucleic acid scaffold modification
  source 1..20: mol_type = other RNA
aggacattggcagttgtttc

SEQ ID NO: 1380 - RNA, 20 nt, synthetic construct
  misc_feature 1..20: note = Antisense oligonucleotide
  modified_base 1..2: mod_base = OTHER; note = misc_feature - bicyclic nucleic acid scaffold modification
  source 1..20: mol_type = other RNA
aggacattggcagttgtttc

SEQ ID NO: 1381 - RNA, 20 nt, synthetic construct
  modified_base 19: mod_base = OTHER; note = thymine
  misc_feature 1..20: note = Antisense oligonucleotide
  modified_base 19..20: mod_base = OTHER; note = misc_feature - bicyclic nucleic acid scaffold modification
  source 1..20: mol_type = other RNA
aggacattggcagttgtttc

SEQ ID NO: 1382 - RNA, 18 nt, synthetic construct
  misc_feature 1..18: note = Antisense oligonucleotide
  source 1..18: mol_type = other RNA
gacattggcagttgtttc

SEQ ID NO: 1383 - RNA, 18 nt, synthetic construct
  misc_feature 1..18: note = Antisense oligonucleotide
  modified_base 1: mod_base = OTHER; note = misc_feature - bicyclic nucleic acid scaffold modification
  source 1..18: mol_type = other RNA
gacattggcagttgtttc

SEQ ID NO: 1384 - RNA, 18 nt, synthetic construct
  misc_feature 1..18: note = Antisense oligonucleotide
  modified_base 18: mod_base = OTHER; note = misc_feature - bicyclic nucleic acid scaffold modification
  source 1..18: mol_type = other RNA
gacattggcagttgtttc

SEQ ID NO: 1385 - RNA, 18 nt, synthetic construct
  misc_feature 1..18: note = Antisense oligonucleotide
  modified_base 1: mod_base = OTHER; note = misc_feature - bicyclic nucleic acid scaffold modification
  modified_base 18: mod_base = OTHER; note = misc_feature - bicyclic nucleic acid scaffold modification
  source 1..18: mol_type = other RNA
gacattggcagttgtttc

SEQ ID NO: 1386 - RNA, 18 nt, synthetic construct
  misc_feature 1..18: note = Antisense oligonucleotide
  modified_base 1..2: mod_base = OTHER; note = misc_feature - bicyclic nucleic acid scaffold modification
  source 1..18: mol_type = other RNA
gacattggcagttgtttc

SEQ ID NO: 1387 - RNA, 18 nt, synthetic construct
  modified_base 17: mod_base = OTHER; note = thymine
  misc_feature 1..18: note = Antisense oligonucleotide
  modified_base 17..18: mod_base = OTHER; note = misc_feature - bicyclic nucleic acid scaffold modification
  source 1..18: mol_type = other RNA
gacattggcagttgtttc

SEQ ID NO: 1388 - RNA, 16 nt, synthetic construct
  misc_feature 1..16: note = Antisense oligonucleotide
  source 1..16: mol_type = other RNA
cattggcagttgtttc

SEQ ID NO: 1389 - RNA, 16 nt, synthetic construct
  misc_feature 1..16: note = Antisense oligonucleotide
  modified_base 1: mod_base = OTHER; note = misc_feature - bicyclic nucleic acid scaffold modification
  source 1..16: mol_type = other RNA
cattggcagttgtttc

SEQ ID NO: 1390 - RNA, 16 nt, synthetic construct
  misc_feature 1..16: note = Antisense oligonucleotide
  modified_base 16: mod_base = OTHER; note = misc_feature - bicyclic nucleic acid scaffold modification
  source 1..16: mol_type = other RNA
cattggcagttgtttc

SEQ ID NO: 1391 - RNA, 16 nt, synthetic construct
  misc_feature 1..16: note = Antisense oligonucleotide
  modified_base 1: mod_base = OTHER; note = misc_feature - bicyclic nucleic acid scaffold modification
  modified_base 16: mod_base = OTHER; note = misc_feature - bicyclic nucleic acid scaffold modification
  source 1..16: mol_type = other RNA
cattggcagttgtttc

SEQ ID NO: 1392 - RNA, 16 nt, synthetic construct
  misc_feature 1..16: note = Antisense oligonucleotide
  modified_base 1..2: mod_base = OTHER; note = misc_feature - bicyclic nucleic acid scaffold modification
  source 1..16: mol_type = other RNA
cattggcagttgtttc

SEQ ID NO: 1393 - RNA, 16 nt, synthetic construct
  modified_base 15: mod_base = OTHER; note = thymine
  misc_feature 1..16: note = Antisense oligonucleotide
  modified_base 15..16: mod_base = OTHER; note = misc_feature - bicyclic nucleic acid scaffold modification
  source 1..16: mol_type = other RNA
cattggcagttgtttc

SEQ ID NO: 1394 - RNA, 18 nt, synthetic construct
  misc_feature 1..18: note = Antisense oligonucleotide
  source 1..18: mol_type = other RNA
taggacattggcagttgt

SEQ ID NO: 1395 - RNA, 18 nt, synthetic construct
  modified_base 1: mod_base = OTHER; note = thymine
  misc_feature 1..18: note = Antisense oligonucleotide
  modified_base 1: mod_base = OTHER; note = misc_feature - bicyclic nucleic acid scaffold modification
  source 1..18: mol_type = other RNA
taggacattggcagttgt

SEQ ID NO: 1396 - RNA, 18 nt, synthetic construct
  modified_base 18: mod_base = OTHER; note = thymine
  misc_feature 1..18: note = Antisense oligonucleotide
  modified_base 18: mod_base = OTHER; note = misc_feature - bicyclic nucleic acid scaffold modification
  source 1..18: mol_type = other RNA
taggacattggcagttgt

SEQ ID NO: 1397 - RNA, 18 nt, synthetic construct
  modified_base 1: mod_base = OTHER; note = thymine
  modified_base 18: mod_base = OTHER; note = thymine
  misc_feature 1..18: note = Antisense oligonucleotide
  modified_base 1: mod_base = OTHER; note = misc_feature - bicyclic nucleic acid scaffold modification
  modified_base 18: mod_base = OTHER; note = misc_feature - bicyclic nucleic acid scaffold modification
  source 1..18: mol_type = other RNA
taggacattggcagttgt

SEQ ID NO: 1398 - RNA, 18 nt, synthetic construct
  modified_base 1: mod_base = OTHER; note = thymine
  misc_feature 1..18: note = Antisense oligonucleotide
  modified_base 1..2: mod_base = OTHER; note = misc_feature - bicyclic nucleic acid scaffold modification
  source 1..18: mol_type = other RNA
taggacattggcagttgt

SEQ ID NO: 1399 - RNA, 18 nt, synthetic construct
  modified_base 18: mod_base = OTHER; note = thymine
  misc_feature 1..18: note = Antisense oligonucleotide
  modified_base 17..18: mod_base = OTHER; note = misc_feature - bicyclic nucleic acid scaffold modification
  source 1..18: mol_type = other RNA
taggacattggcagttgt

SEQ ID NO: 1400 - RNA, 15 nt, synthetic construct
  misc_feature 1..15: note = Antisense oligonucleotide
  source 1..15: mol_type = other RNA
ctgtaaggaaaataa

SEQ ID NO: 1401 - RNA, 15 nt, synthetic construct
  misc_feature 1..15: note = Antisense oligonucleotide
  modified_base 1: mod_base = OTHER; note = misc_feature - bicyclic nucleic acid scaffold modification
  source 1..15: mol_type = other RNA
ctgtaaggaaaataa

SEQ ID NO: 1402 - RNA, 15 nt, synthetic construct
  misc_feature 1..15: note = Antisense oligonucleotide
  modified_base 15: mod_base = OTHER; note = misc_feature - bicyclic nucleic acid scaffold modification
  source 1..15: mol_type = other RNA
ctgtaaggaaaataa

SEQ ID NO: 1403 - RNA, 15 nt, synthetic construct
  misc_feature 1..15: note = Antisense oligonucleotide
  modified_base 1: mod_base = OTHER; note = misc_feature - bicyclic nucleic acid scaffold modification
  modified_base 15: mod_base = OTHER; note = misc_feature - bicyclic nucleic acid scaffold modification
  source 1..15: mol_type = other RNA
ctgtaaggaaaataa

SEQ ID NO: 1404 - RNA, 15 nt, synthetic construct
  modified_base 2: mod_base = OTHER; note = thymine
  misc_feature 1..15: note = Antisense oligonucleotide
  modified_base 1..2: mod_base = OTHER; note = misc_feature - bicyclic nucleic acid scaffold modification
  source 1..15: mol_type = other RNA
ctgtaaggaaaataa

SEQ ID NO: 1405 - RNA, 15 nt, synthetic construct
  misc_feature 1..15: note = Antisense oligonucleotide
  modified_base 14..15: mod_base = OTHER; note = misc_feature - bicyclic nucleic acid scaffold modification
  source 1..15: mol_type = other RNA
ctgtaaggaaaataa

SEQ ID NO: 1406 - RNA, 15 nt, synthetic construct
  misc_feature 1..15: note = Antisense oligonucleotide
  source 1..15: mol_type = other RNA
aggaaaataaaggaa

SEQ ID NO: 1407 - RNA, 15 nt, synthetic construct
  misc_feature 1..15: note = Antisense oligonucleotide
  modified_base 1: mod_base = OTHER; note = misc_feature - bicyclic nucleic acid scaffold modification
  source 1..15: mol_type = other RNA
aggaaaataaaggaa

SEQ ID NO: 1408 - RNA, 15 nt, synthetic construct
  misc_feature 1..15: note = Antisense oligonucleotide
  modified_base 15: mod_base = OTHER; note = misc_feature - bicyclic nucleic acid scaffold modification
  source 1..15: mol_type = other RNA
aggaaaataaaggaa

SEQ ID NO: 1409 - RNA, 15 nt, synthetic construct
  misc_feature 1..15: note = Antisense oligonucleotide
  modified_base 1: mod_base = OTHER; note = misc_feature - bicyclic nucleic acid scaffold modification
  modified_base 15: mod_base = OTHER; note = misc_feature - bicyclic nucleic acid scaffold modification
  source 1..15: mol_type = other RNA
aggaaaataaaggaa

SEQ ID NO: 1410 - RNA, 15 nt, synthetic construct
  misc_feature 1..15: note = Antisense oligonucleotide
  modified_base 1..2: mod_base = OTHER; note = misc_feature - bicyclic nucleic acid scaffold modification
  source 1..15: mol_type = other RNA
aggaaaataaaggaa

SEQ ID NO: 1411 - RNA, 15 nt, synthetic construct
  misc_feature 1..15: note = Antisense oligonucleotide
  modified_base 14..15: mod_base = OTHER; note = misc_feature - bicyclic nucleic acid scaffold modification
  source 1..15: mol_type = other RNA
aggaaaataaaggaa

SEQ ID NO: 1412 - RNA, 15 nt, synthetic construct
  misc_feature 1..15: note = Antisense oligonucleotide
  source 1..15: mol_type = other RNA
aataaaggaagttaa

SEQ ID NO: 1413 - RNA, 15 nt, synthetic construct
  misc_feature 1..15: note = Antisense oligonucleotide
  modified_base 1: mod_base = OTHER; note = misc_feature - bicyclic nucleic acid scaffold modification
  source 1..15: mol_type = other RNA
aataaaggaagttaa

SEQ ID NO: 1414 - RNA, 15 nt, synthetic construct
  misc_feature 1..15: note = Antisense oligonucleotide
  modified_base 15: mod_base = OTHER; note = misc_feature - bicyclic nucleic acid scaffold modification
  source 1..15: mol_type = other RNA
aataaaggaagttaa

SEQ ID NO: 1415 - RNA, 15 nt, synthetic construct
  misc_feature 1..15: note = Antisense oligonucleotide
  modified_base 1: mod_base = OTHER; note = misc_feature - bicyclic nucleic acid scaffold modification
  modified_base 15: mod_base = OTHER; note = misc_feature - bicyclic nucleic acid scaffold modification
  source 1..15: mol_type = other RNA
aataaaggaagttaa

SEQ ID NO: 1416 - RNA, 15 nt, synthetic construct
  misc_feature 1..15: note = Antisense oligonucleotide
  modified_base 1..2: mod_base = OTHER; note = misc_feature - bicyclic nucleic acid scaffold modification
  source 1..15: mol_type = other RNA
aataaaggaagttaa

SEQ ID NO: 1417 - RNA, 15 nt, synthetic construct
  misc_feature 1..15: note = Antisense oligonucleotide
  modified_base 14..15: mod_base = OTHER; note = misc_feature - bicyclic nucleic acid scaffold modification
  source 1..15: mol_type = other RNA
aataaaggaagttaa

SEQ ID NO: 1418 - RNA, 15 nt, synthetic construct
  misc_feature 1..15: note = Antisense oligonucleotide
  source 1..15: mol_type = other RNA
atagctatatagata

SEQ ID NO: 1419 - RNA, 15 nt, synthetic construct
  misc_feature 1..15: note = Antisense oligonucleotide
  modified_base 1: mod_base = OTHER; note = misc_feature - bicyclic nucleic acid scaffold modification
  source 1..15: mol_type = other RNA
atagctatatagata

SEQ ID NO: 1420 - RNA, 15 nt, synthetic construct
  misc_feature 1..15: note = Antisense oligonucleotide
  modified_base 15: mod_base = OTHER; note = misc_feature - bicyclic nucleic acid scaffold modification
  source 1..15: mol_type = other RNA
atagctatatagata

SEQ ID NO: 1421 - RNA, 15 nt, synthetic construct
  misc_feature 1..15: note = Antisense oligonucleotide
  modified_base 1: mod_base = OTHER; note = misc_feature - bicyclic nucleic acid scaffold modification
  modified_base 15: mod_base = OTHER; note = misc_feature - bicyclic nucleic acid scaffold modification
  source 1..15: mol_type = other RNA
atagctatatagata

SEQ ID NO: 1422 - RNA, 15 nt, synthetic construct
  modified_base 2: mod_base = OTHER; note = thymine
  misc_feature 1..15: note = Antisense oligonucleotide
  modified_base 1..2: mod_base = OTHER; note = misc_feature - bicyclic nucleic acid scaffold modification
  source 1..15: mol_type = other RNA
atagctatatagata

SEQ ID NO: 1423 - RNA, 15 nt, synthetic construct
  modified_base 14: mod_base = OTHER; note = thymine
  misc_feature 1..15: note = Antisense oligonucleotide
  modified_base 14..15: mod_base = OTHER; note = misc_feature - bicyclic nucleic acid scaffold modification
  source 1..15: mol_type = other RNA
atagctatatagata

SEQ ID NO: 1424 - RNA, 15 nt, synthetic construct
  misc_feature 1..15: note = Antisense oligonucleotide
  source 1..15: mol_type = other RNA
tatatagatatagat

SEQ ID NO: 1425 - RNA, 15 nt, synthetic construct
  modified_base 1: mod_base = OTHER; note = thymine
  misc_feature 1..15: note = Antisense oligonucleotide
  modified_base 1: mod_base = OTHER; note = misc_feature - bicyclic nucleic acid scaffold modification
  source 1..15: mol_type = other RNA
tatatagatatagat

SEQ ID NO: 1426 - RNA, 15 nt, synthetic construct
  modified_base 15: mod_base = OTHER; note = thymine
  misc_feature 1..15: note = Antisense oligonucleotide
  modified_base 15: mod_base = OTHER; note = misc_feature - bicyclic nucleic acid scaffold modification
  source 1..15: mol_type = other RNA
tatatagatatagat

SEQ ID NO: 1427 - RNA, 15 nt, synthetic construct
  modified_base 1: mod_base = OTHER; note = thymine
  modified_base 15: mod_base = OTHER; note = thymine
  misc_feature 1..15: note = Antisense oligonucleotide
  modified_base 1: mod_base = OTHER; note = misc_feature - bicyclic nucleic acid scaffold modification
  modified_base 15: mod_base = OTHER; note = misc_feature - bicyclic nucleic acid scaffold modification
  source 1..15: mol_type = other RNA
tatatagatatagat

SEQ ID NO: 1428 - RNA, 15 nt, synthetic construct
  modified_base 1: mod_base = OTHER; note = thymine
  misc_feature 1..15: note = Antisense oligonucleotide
  modified_base 1..2: mod_base = OTHER; note = misc_feature - bicyclic nucleic acid scaffold modification
  source 1..15: mol_type = other RNA
tatatagatatagat

SEQ ID NO: 1429 - RNA, 15 nt, synthetic construct
  modified_base 15: mod_base = OTHER; note = thymine
  misc_feature 1..15: note = Antisense oligonucleotide
  modified_base 14..15: mod_base = OTHER; note = misc_feature - bicyclic nucleic acid scaffold modification
  source 1..15: mol_type = other RNA
tatatagatatagat

SEQ ID NO: 1430 - RNA, 15 nt, synthetic construct
  misc_feature 1..15: note = Antisense oligonucleotide
  source 1..15: mol_type = other RNA
agatatagatagcta

SEQ ID NO: 1431 - RNA, 15 nt, synthetic construct
  misc_feature 1..15: note = Antisense oligonucleotide
  modified_base 1: mod_base = OTHER; note = misc_feature - bicyclic nucleic acid scaffold modification
  source 1..15: mol_type = other RNA
agatatagatagcta

SEQ ID NO: 1432 - RNA, 15 nt, synthetic construct
  misc_feature 1..15: note = Antisense oligonucleotide
  modified_base 15: mod_base = OTHER; note = misc_feature - bicyclic nucleic acid scaffold modification
  source 1..15: mol_type = other RNA
agatatagatagcta

SEQ ID NO: 1433 - RNA, 15 nt, synthetic construct
  misc_feature 1..15: note = Antisense oligonucleotide
  modified_base 1: mod_base = OTHER; note = misc_feature - bicyclic nucleic acid scaffold modification
  modified_base 15: mod_base = OTHER; note = misc_feature - bicyclic nucleic acid scaffold modification
  source 1..15: mol_type = other RNA
agatatagatagcta

SEQ ID NO: 1434 - RNA, 15 nt, synthetic construct
  misc_feature 1..15: note = Antisense oligonucleotide
  modified_base 1..2: mod_base = OTHER; note = misc_feature - bicyclic nucleic acid scaffold modification
  source 1..15: mol_type = other RNA
agatatagatagcta

SEQ ID NO: 1435 - RNA, 15 nt, synthetic construct
  modified_base 14: mod_base = OTHER; note = thymine
  misc_feature 1..15: note = Antisense oligonucleotide
  modified_base 14..15: mod_base = OTHER; note = misc_feature - bicyclic nucleic acid scaffold modification
  source 1..15: mol_type = other RNA
agatatagatagcta

SEQ ID NO: 1436 - RNA, 15 nt, synthetic construct
  misc_feature 1..15: note = Antisense oligonucleotide
  source 1..15: mol_type = other RNA
tagatagctatatat

SEQ ID NO: 1437 - RNA, 15 nt, synthetic construct
  modified_base 1: mod_base = OTHER; note = thymine
  misc_feature 1..15: note = Antisense oligonucleotide
  modified_base 1: mod_base = OTHER; note = misc_feature - bicyclic nucleic acid scaffold modification
  source 1..15: mol_type = other RNA
tagatagctatatat

SEQ ID NO: 1438 - RNA, 15 nt, synthetic construct
  modified_base 15: mod_base = OTHER; note = thymine
  misc_feature 1..15: note = Antisense oligonucleotide
  modified_base 15: mod_base = OTHER; note = misc_feature - bicyclic nucleic acid scaffold modification
  source 1..15: mol_type = other RNA
tagatagctatatat

SEQ ID NO: 1439 - RNA, 15 nt, synthetic construct
  modified_base 1: mod_base = OTHER; note = thymine
  modified_base 15: mod_base = OTHER; note = thymine
  misc_feature 1..15: note = Antisense oligonucleotide
  modified_base 1: mod_base = OTHER; note = misc_feature - bicyclic nucleic acid scaffold modification
  modified_base 15: mod_base = OTHER; note = misc_feature - bicyclic nucleic acid scaffold modification
  source 1..15: mol_type = other RNA
tagatagctatatat

SEQ ID NO: 1440 - RNA, 15 nt, synthetic construct
  modified_base 1: mod_base = OTHER; note = thymine
  misc_feature 1..15: note = Antisense oligonucleotide
  modified_base 1..2: mod_base = OTHER; note = misc_feature - bicyclic nucleic acid scaffold modification
  source 1..15: mol_type = other RNA
tagatagctatatat

SEQ ID NO: 1441 - RNA, 15 nt, synthetic construct
  modified_base 15: mod_base = OTHER; note = thymine
  misc_feature 1..15: note = Antisense oligonucleotide
  modified_base 14..15: mod_base = OTHER; note = misc_feature - bicyclic nucleic acid scaffold modification
  source 1..15: mol_type = other RNA
tagatagctatatat

SEQ ID NO: 1442 - RNA, 15 nt, synthetic construct
  misc_feature 1..15: note = Antisense oligonucleotide
  source 1..15: mol_type = other RNA
tgctggcagacttac

SEQ ID NO: 1443 - RNA, 15 nt, synthetic construct
  modified_base 1: mod_base = OTHER; note = thymine
  misc_feature 1..15: note = Antisense oligonucleotide
  modified_base 1: mod_base = OTHER; note = misc_feature - bicyclic nucleic acid scaffold modification
  source 1..15: mol_type = other RNA
tgctggcagacttac

SEQ ID NO: 1444 - RNA, 15 nt, synthetic construct
  misc_feature 1..15: note = Antisense oligonucleotide
  modified_base 15: mod_base = OTHER; note = misc_feature - bicyclic nucleic acid scaffold modification
  source 1..15: mol_type = other RNA
tgctggcagacttac

SEQ ID NO: 1445 - RNA, 15 nt, synthetic construct
  modified_base 1: mod_base = OTHER; note = thymine
  misc_feature 1..15: note = Antisense oligonucleotide
  modified_base 1: mod_base = OTHER; note = misc_feature - bicyclic nucleic acid scaffold modification
  modified_base 15: mod_base = OTHER; note = misc_feature - bicyclic nucleic acid scaffold modification
  source 1..15: mol_type = other RNA
tgctggcagacttac

SEQ ID NO: 1446 - RNA, 15 nt, synthetic construct
  modified_base 1: mod_base = OTHER; note = thymine
  misc_feature 1..15: note = Antisense oligonucleotide
  modified_base 1..2: mod_base = OTHER; note = misc_feature - bicyclic nucleic acid scaffold modification
  source 1..15: mol_type = other RNA
tgctggcagacttac

SEQ ID NO: 1447 - RNA, 15 nt, synthetic construct
  misc_feature 1..15: note = Antisense oligonucleotide
  modified_base 14..15: mod_base = OTHER; note = misc_feature - bicyclic nucleic acid scaffold modification
  source 1..15: mol_type = other RNA
tgctggcagacttac

SEQ ID NO: 1448 - RNA, 15 nt, synthetic construct
  misc_feature 1..15: note = Antisense oligonucleotide
  source 1..15: mol_type = other RNA
cataatgctggcaga

SEQ ID NO: 1449 - RNA, 15 nt, synthetic construct
  misc_feature 1..15: note = Antisense oligonucleotide
  modified_base 1: mod_base = OTHER; note = misc_feature - bicyclic nucleic acid scaffold modification
  source 1..15: mol_type = other RNA
cataatgctggcaga

SEQ ID NO: 1450 - RNA, 15 nt, synthetic construct
  misc_feature 1..15: note = Antisense oligonucleotide
  modified_base 15: mod_base = OTHER; note = misc_feature - bicyclic nucleic acid scaffold modification
  source 1..15: mol_type = other RNA
cataatgctggcaga

SEQ ID NO: 1451 - RNA, 15 nt, synthetic construct
  misc_feature 1..15: note = Antisense oligonucleotide
  modified_base 1: mod_base = OTHER; note = misc_feature - bicyclic nucleic acid scaffold modification
  modified_base 15: mod_base = OTHER; note = misc_feature - bicyclic nucleic acid scaffold modification
  source 1..15: mol_type = other RNA
cataatgctggcaga

SEQ ID NO: 1452 - RNA, 15 nt, synthetic construct
  misc_feature 1..15: note = Antisense oligonucleotide
  modified_base 1..2: mod_base = OTHER; note = misc_feature - bicyclic nucleic acid scaffold modification
  source 1..15: mol_type = other RNA
cataatgctggcaga

SEQ ID NO: 1453 - RNA, 15 nt, synthetic construct
  misc_feature 1..15: note = Antisense oligonucleotide
  modified_base 14..15: mod_base = OTHER; note = misc_feature - bicyclic nucleic acid scaffold modification
  source 1..15: mol_type = other RNA
cataatgctggcaga

SEQ ID NO: 1454 - RNA, 15 nt, synthetic construct
  misc_feature 1..15: note = Antisense oligonucleotide
  source 1..15: mol_type = other RNA
tcataatgctggcag

SEQ ID NO: 1455 - RNA, 15 nt, synthetic construct
  modified_base 1: mod_base = OTHER; note = thymine
  misc_feature 1..15: note = Antisense oligonucleotide
  modified_base 1: mod_base = OTHER; note = misc_feature - bicyclic nucleic acid scaffold modification
  source 1..15: mol_type = other RNA
tcataatgctggcag

SEQ ID NO: 1456 - RNA, 15 nt, synthetic construct
  misc_feature 1..15: note = Antisense oligonucleotide
  modified_base 15: mod_base = OTHER; note = misc_feature - bicyclic nucleic acid scaffold modification
  source 1..15: mol_type = other RNA
tcataatgctggcag

SEQ ID NO: 1457 - RNA, 15 nt, synthetic construct
  modified_base 1: mod_base = OTHER; note = thymine
  misc_feature 1..15: note = Antisense oligonucleotide
  modified_base 1: mod_base = OTHER; note = misc_feature - bicyclic nucleic acid scaffold modification
  modified_base 15: mod_base = OTHER; note = misc_feature - bicyclic nucleic acid scaffold modification
  source 1..15: mol_type = other RNA
tcataatgctggcag

SEQ ID NO: 1458 - RNA, 15 nt, synthetic construct
  modified_base 1: mod_base = OTHER; note = thymine
  misc_feature 1..15: note = Antisense oligonucleotide
  modified_base 1..2: mod_base = OTHER; note = misc_feature - bicyclic nucleic acid scaffold modification
  source 1..15: mol_type = other RNA
tcataatgctggcag

SEQ ID NO: 1459 - RNA, 15 nt, synthetic construct
  misc_feature 1..15: note = Antisense oligonucleotide
  modified_base 14..15: mod_base = OTHER; note = misc_feature - bicyclic nucleic acid scaffold modification
  source 1..15: mol_type = other RNA
tcataatgctggcag

SEQ ID NO: 1460 - RNA, 15 nt, synthetic construct
  misc_feature 1..15: note = Antisense oligonucleotide
  source 1..15: mol_type = other RNA
ttcataatgctggca

SEQ ID NO: 1461 - RNA, 15 nt, synthetic construct
  modified_base 1: mod_base = OTHER; note = thymine
  misc_feature 1..15: note = Antisense oligonucleotide
  modified_base 1: mod_base = OTHER; note = misc_feature - bicyclic nucleic acid scaffold modification
  source 1..15: mol_type = other RNA
ttcataatgctggca

SEQ ID NO: 1462 - RNA, 15 nt, synthetic construct
  misc_feature 1..15: note = Antisense oligonucleotide
  modified_base 15: mod_base = OTHER; note = misc_feature - bicyclic nucleic acid scaffold modification
  source 1..15: mol_type = other RNA
ttcataatgctggca

SEQ ID NO: 1463 - RNA, 15 nt, synthetic construct
  modified_base 1: mod_base = OTHER; note = thymine
  misc_feature 1..15: note = Antisense oligonucleotide
  modified_base 1: mod_base = OTHER; note = misc_feature - bicyclic nucleic acid scaffold modification
  modified_base 15: mod_base = OTHER; note = misc_feature - bicyclic nucleic acid scaffold modification
  source 1..15: mol_type = other RNA
ttcataatgctggca

SEQ ID NO: 1464 - RNA, 15 nt, synthetic construct
  modified_base 1..2: mod_base = OTHER; note = thymine
  misc_feature 1..15: note = Antisense oligonucleotide
  modified_base 1..2: mod_base = OTHER; note = misc_feature - bicyclic nucleic acid scaffold modification
  source 1..15: mol_type = other RNA
ttcataatgctggca

SEQ ID NO: 1465 - RNA, 15 nt, synthetic construct
  misc_feature 1..15: note = Antisense oligonucleotide
  modified_base 14..15: mod_base = OTHER; note = misc_feature - bicyclic nucleic acid scaffold modification
  source 1..15: mol_type = other RNA
ttcataatgctggca

SEQ ID NO: 1466 - RNA, 18 nt, synthetic construct
  misc_feature 1..18: note = Antisense oligonucleotide
  source 1..18: mol_type = other RNA
actttcataatgctggca

SEQ ID NO: 1467 - RNA, 18 nt, synthetic construct
  misc_feature 1..18: note = Antisense oligonucleotide
  modified_base 1: mod_base = OTHER; note = misc_feature - bicyclic nucleic acid scaffold modification
  source 1..18: mol_type = other RNA
actttcataatgctggca

SEQ ID NO: 1468 - RNA, 18 nt, synthetic construct
  misc_feature 1..18: note = Antisense oligonucleotide
  modified_base 18: mod_base = OTHER; note = misc_feature - bicyclic nucleic acid scaffold modification
  source 1..18: mol_type = other RNA
actttcataatgctggca

SEQ ID NO: 1469 - RNA, 18 nt, synthetic construct
  misc_feature 1..18: note = Antisense oligonucleotide
  modified_base 1: mod_base = OTHER; note = misc_feature - bicyclic nucleic acid scaffold modification
  modified_base 18: mod_base = OTHER; note = misc_feature - bicyclic nucleic acid scaffold modification
  source 1..18: mol_type = other RNA
actttcataatgctggca

SEQ ID NO: 1470 - RNA, 18 nt, synthetic construct
  misc_feature 1..18: note = Antisense oligonucleotide
  modified_base 1..2: mod_base = OTHER; note = misc_feature - bicyclic nucleic acid scaffold modification
  source 1..18: mol_type = other RNA
actttcataatgctggca

SEQ ID NO: 1471 - RNA, 18 nt, synthetic construct
  misc_feature 1..18: note = Antisense oligonucleotide
  modified_base 17..18: mod_base = OTHER; note = misc_feature - bicyclic nucleic acid scaffold modification
  source 1..18: mol_type = other RNA
actttcataatgctggca

SEQ ID NO: 1472 - RNA, 15 nt, synthetic construct
  misc_feature 1..15: note = Antisense oligonucleotide
  source 1..15: mol_type = other RNA
tttcataatgctggc

SEQ ID NO: 1473 - RNA, 15 nt, synthetic construct
  modified_base 1: mod_base = OTHER; note = thymine
  misc_feature 1..15: note = Antisense oligonucleotide
  modified_base 1: mod_base = OTHER; note = misc_feature - bicyclic nucleic acid scaffold modification
  source 1..15: mol_type = other RNA
tttcataatgctggc

SEQ ID NO: 1474 - RNA, 15 nt, synthetic construct
  misc_feature 1..15: note = Antisense oligonucleotide
  modified_base 15: mod_base = OTHER; note = misc_feature - bicyclic nucleic acid scaffold modification
  source 1..15: mol_type = other RNA
tttcataatgctggc

SEQ ID NO: 1475 - RNA, 15 nt, synthetic construct
  modified_base 1: mod_base = OTHER; note = thymine
  misc_feature 1..15: note = Antisense oligonucleotide
  modified_base 1: mod_base = OTHER; note = misc_feature - bicyclic nucleic acid scaffold modification
  modified_base 15: mod_base = OTHER; note = misc_feature - bicyclic nucleic acid scaffold modification
  source 1..15: mol_type = other RNA
tttcataatgctggc

SEQ ID NO: 1476 - RNA, 15 nt, synthetic construct
  modified_base 1..2: mod_base = OTHER; note = thymine
  misc_feature 1..15: note = Antisense oligonucleotide
  modified_base 1..2: mod_base = OTHER; note = misc_feature - bicyclic nucleic acid scaffold modification
  source 1..15: mol_type = other RNA
tttcataatgctggc

SEQ ID NO: 1477 - RNA, 15 nt, synthetic construct
  misc_feature 1..15: note = Antisense oligonucleotide
  modified_base 14..15: mod_base = OTHER; note = misc_feature - bicyclic nucleic acid scaffold modification
  source 1..15: mol_type = other RNA
tttcataatgctggc

SEQ ID NO: 1478 - RNA, 18 nt, synthetic construct
  misc_feature 1..18: note = Antisense oligonucleotide
  source 1..18: mol_type = other RNA
cactttcataatgctggc

SEQ ID NO: 1479 - RNA, 18 nt, synthetic construct
  misc_feature 1..18: note = Antisense oligonucleotide
  modified_base 1: mod_base = OTHER; note = misc_feature - bicyclic nucleic acid scaffold modification
  source 1..18: mol_type = other RNA
cactttcataatgctggc

SEQ ID NO: 1480 - RNA, 18 nt, synthetic construct
  misc_feature 1..18: note = Antisense oligonucleotide
  modified_base 18: mod_base = OTHER; note = misc_feature - bicyclic nucleic acid scaffold modification
  source 1..18: mol_type = other RNA
cactttcataatgctggc

SEQ ID NO: 1481 - RNA, 18 nt, synthetic construct
  misc_feature 1..18: note = Antisense oligonucleotide
  modified_base 1: mod_base = OTHER; note = misc_feature - bicyclic nucleic acid scaffold modification
  modified_base 18: mod_base = OTHER; note = misc_feature - bicyclic nucleic acid scaffold modification
  source 1..18: mol_type = other RNA
cactttcataatgctggc

SEQ ID NO: 1482 - RNA, 18 nt, synthetic construct
  misc_feature 1..18: note = Antisense oligonucleotide
  modified_base 1..2: mod_base = OTHER; note = misc_feature - bicyclic nucleic acid scaffold modification
  source 1..18: mol_type = other RNA
cactttcataatgctggc

SEQ ID NO: 1483 - RNA, 18 nt, synthetic construct
  misc_feature 1..18: note = Antisense oligonucleotide
  modified_base 17..18: mod_base = OTHER; note = misc_feature - bicyclic nucleic acid scaffold modification
  source 1..18: mol_type = other RNA
cactttcataatgctggc

SEQ ID NO: 1484 - RNA, 15 nt, synthetic construct
  misc_feature 1..15: note = Antisense oligonucleotide
  source 1..15: mol_type = other RNA
ctttcataatgctgg

SEQ ID NO: 1485 - RNA, 15 nt, synthetic construct
  misc_feature 1..15: note = Antisense oligonucleotide
  modified_base 1: mod_base = OTHER; note = misc_feature - bicyclic nucleic acid scaffold modification
  source 1..15: mol_type = other RNA
ctttcataatgctgg

SEQ ID NO: 1486 - RNA, 15 nt, synthetic construct
  misc_feature 1..15: note = Antisense oligonucleotide
  modified_base 15: mod_base = OTHER; note = misc_feature - bicyclic nucleic acid scaffold modification
  source 1..15: mol_type = other RNA
ctttcataatgctgg

SEQ ID NO: 1487 - RNA, 15 nt, synthetic construct
  misc_feature 1..15: note = Antisense oligonucleotide
  modified_base 1: mod_base = OTHER; note = misc_feature - bicyclic nucleic acid scaffold modification
  modified_base 15: mod_base = OTHER; note = misc_feature - bicyclic nucleic acid scaffold modification
  source 1..15: mol_type = other RNA
ctttcataatgctgg

SEQ ID NO: 1488 - RNA, 15 nt, synthetic construct
  modified_base 2: mod_base = OTHER; note = thymine
  misc_feature 1..15: note = Antisense oligonucleotide
  modified_base 1..2: mod_base = OTHER; note = misc_feature - bicyclic nucleic acid scaffold modification
  source 1..15: mol_type = other RNA
ctttcataatgctgg

SEQ ID NO: 1489 - RNA, 15 nt, synthetic construct
  misc_feature 1..15: note = Antisense oligonucleotide
  modified_base 14..15: mod_base = OTHER; note = misc_feature - bicyclic nucleic acid scaffold modification
  source 1..15: mol_type = other RNA
ctttcataatgctgg

SEQ ID NO: 1490 - RNA, 18 nt, synthetic construct
  misc_feature 1..18: note = Antisense oligonucleotide
  source 1..18: mol_type = other RNA
tcactttcataatgctgg

SEQ ID NO: 1491 - RNA, 18 nt, synthetic construct
  modified_base 1: mod_base = OTHER; note = thymine
  misc_feature 1..18: note = Antisense oligonucleotide
  modified_base 1: mod_base = OTHER; note = misc_feature - bicyclic nucleic acid scaffold modification
  source 1..18: mol_type = other RNA
tcactttcataatgctgg

SEQ ID NO: 1492 - RNA, 18 nt, synthetic construct
  misc_feature 1..18: note = Antisense oligonucleotide
  modified_base 18: mod_base = OTHER; note = misc_feature - bicyclic nucleic acid scaffold modification
  source 1..18: mol_type = other RNA
tcactttcataatgctgg

SEQ ID NO: 1493 - RNA, 18 nt, synthetic construct
  modified_base 1: mod_base = OTHER; note = thymine
  misc_feature 1..18: note = Antisense oligonucleotide
  modified_base 1: mod_base = OTHER; note = misc_feature - bicyclic nucleic acid scaffold modification
  modified_base 18: mod_base = OTHER; note = misc_feature - bicyclic nucleic acid scaffold modification
  source 1..18: mol_type = other RNA
tcactttcataatgctgg

SEQ ID NO: 1494 - RNA, 18 nt, synthetic construct
  modified_base 1: mod_base = OTHER; note = thymine
  misc_feature 1..18: note = Antisense oligonucleotide
  modified_base 1..2: mod_base = OTHER; note = misc_feature - bicyclic nucleic acid scaffold modification
  source 1..18: mol_type = other RNA
tcactttcataatgctgg

SEQ ID NO: 1495 - RNA, 18 nt, synthetic construct
  misc_feature 1..18: note = Antisense oligonucleotide
  modified_base 17..18: mod_base = OTHER; note = misc_feature - bicyclic nucleic acid scaffold modification
  source 1..18: mol_type = other RNA
tcactttcataatgctgg

SEQ ID NO: 1496 - RNA, 20 nt, synthetic construct
  misc_feature 1..20: note = Antisense oligonucleotide
  source 1..20: mol_type = other RNA
attcactttcataatgctgg

SEQ ID NO: 1497 - RNA, 20 nt, synthetic construct
  misc_feature 1..20: note = Antisense oligonucleotide
  modified_base 1: mod_base = OTHER; note = misc_feature - bicyclic nucleic acid scaffold modification
  source 1..20: mol_type = other RNA
attcactttcataatgctgg

SEQ ID NO: 1498 - RNA, 20 nt, synthetic construct
  misc_feature 1..20: note = Antisense oligonucleotide
  modified_base 20: mod_base = OTHER; note = misc_feature - bicyclic nucleic acid scaffold modification
  source 1..20: mol_type = other RNA
attcactttcataatgctgg

SEQ ID NO: 1499 - RNA, 20 nt, synthetic construct
  misc_feature 1..20: note = Antisense oligonucleotide
  modified_base 1: mod_base = OTHER; note = misc_feature - bicyclic nucleic acid scaffold modification
  modified_base 20: mod_base = OTHER; note = misc_feature - bicyclic nucleic acid scaffold modification
  source 1..20: mol_type = other RNA
attcactttcataatgctgg

SEQ ID NO: 1500 - RNA, 20 nt, synthetic construct
  modified_base 2: mod_base = OTHER; note = thymine
  misc_feature 1..20: note = Antisense oligonucleotide
  modified_base 1..2: mod_base = OTHER; note = misc_feature - bicyclic nucleic acid scaffold modification
  source 1..20: mol_type = other RNA
attcactttcataatgctgg

SEQ ID NO: 1501 - RNA, 20 nt, synthetic construct
  misc_feature 1..20: note = Antisense oligonucleotide
  modified_base 19..20: mod_base = OTHER; note = misc_feature - bicyclic nucleic acid scaffold modification
  source 1..20: mol_type = other RNA
attcactttcataatgctgg

SEQ ID NO: 1502 - RNA, 15 nt, synthetic construct
  misc_feature 1..15: note = Antisense oligonucleotide
  source 1..15: mol_type = other RNA
actttcataatgctg

SEQ ID NO: 1503 - RNA, 15 nt, synthetic construct
  misc_feature 1..15: note = Antisense oligonucleotide
  modified_base 1: mod_base = OTHER; note = misc_feature - bicyclic nucleic acid scaffold modification
  source 1..15: mol_type = other RNA
actttcataatgctg

SEQ ID NO: 1504 - RNA, 15 nt, synthetic construct
  misc_feature 1..15: note = Antisense oligonucleotide
  modified_base 15: mod_base = OTHER; note = misc_feature - bicyclic nucleic acid scaffold modification
  source 1..15: mol_type = other RNA
actttcataatgctg

SEQ ID NO: 1505 - RNA, 15 nt, synthetic construct
  misc_feature 1..15: note = Antisense oligonucleotide
  modified_base 1: mod_base = OTHER; note = misc_feature - bicyclic nucleic acid scaffold modification
  modified_base 15: mod_base = OTHER; note = misc_feature - bicyclic nucleic acid scaffold modification
  source 1..15: mol_type = other RNA
actttcataatgctg

SEQ ID NO: 1506 - RNA, 15 nt, synthetic construct
  misc_feature 1..15: note = Antisense oligonucleotide
  modified_base 1..2: mod_base = OTHER; note = misc_feature - bicyclic nucleic acid scaffold modification
  source 1..15: mol_type = other RNA
actttcataatgctg

SEQ ID NO: 1507 - RNA, 15 nt, synthetic construct
  modified_base 14: mod_base = OTHER; note = thymine
  misc_feature 1..15: note = Antisense oligonucleotide
  modified_base 14..15: mod_base = OTHER; note = misc_feature - bicyclic nucleic acid scaffold modification
  source 1..15: mol_type = other RNA
actttcataatgctg

SEQ ID NO: 1508 - RNA, 18 nt, synthetic construct
  misc_feature 1..18: note = Antisense oligonucleotide
  source 1..18: mol_type = other RNA
ttcactttcataatgctg

SEQ ID NO: 1509 - RNA, 18 nt, synthetic construct
  modified_base 1: mod_base = OTHER; note = thymine
  misc_feature 1..18: note = Antisense oligonucleotide
  modified_base 1: mod_base = OTHER; note = misc_feature - bicyclic nucleic acid scaffold modification
  source 1..18: mol_type = other RNA
ttcactttcataatgctg

SEQ ID NO: 1510 - RNA, 18 nt, synthetic construct
  misc_feature 1..18: note = Antisense oligonucleotide
  modified_base 18: mod_base = OTHER; note = misc_feature - bicyclic nucleic acid scaffold modification
  source 1..18: mol_type = other RNA
ttcactttcataatgctg

SEQ ID NO: 1511 - RNA, 18 nt, synthetic construct
  modified_base 1: mod_base = OTHER; note = thymine
  misc_feature 1..18: note = Antisense oligonucleotide
  modified_base 1: mod_base = OTHER; note = misc_feature - bicyclic nucleic acid scaffold modification
  modified_base 18: mod_base = OTHER; note = misc_feature - bicyclic nucleic acid scaffold modification
  source 1..18: mol_type = other RNA
ttcactttcataatgctg

SEQ ID NO: 1512 - RNA, 18 nt, synthetic construct
  modified_base 1..2: mod_base = OTHER; note = thymine
  misc_feature 1..18: note = Antisense oligonucleotide
  modified_base 1..2: mod_base = OTHER; note = misc_feature - bicyclic nucleic acid scaffold modification
  source 1..18: mol_type = other RNA
ttcactttcataatgctg

SEQ ID NO: 1513 - RNA, 18 nt, synthetic construct
  modified_base 17: mod_base = OTHER; note = thymine
  misc_feature 1..18: note = Antisense oligonucleotide
  modified_base 17..18: mod_base = OTHER; note = misc_feature - bicyclic nucleic acid scaffold modification
  source 1..18: mol_type = other RNA
ttcactttcataatgctg

SEQ ID NO: 1514 - RNA, 15 nt, synthetic construct
  misc_feature 1..15: note = Antisense oligonucleotide
  source 1..15: mol_type = other RNA
cactttcataatgct

SEQ ID NO: 1515 - RNA, 15 nt, synthetic construct
  misc_feature 1..15: note = Antisense oligonucleotide
  modified_base 1: mod_base = OTHER; note = misc_feature - bicyclic nucleic acid scaffold modification
  source 1..15: mol_type = other RNA
cactttcataatgct

SEQ ID NO: 1516 - RNA, 15 nt, synthetic construct
  modified_base 15: mod_base = OTHER; note = thymine
  misc_feature 1..15: note = Antisense oligonucleotide
  modified_base 15: mod_base = OTHER; note = misc_feature - bicyclic nucleic acid scaffold modification
  source 1..15: mol_type = other RNA
cactttcataatgct

SEQ ID NO: 1517 - RNA, 15 nt, synthetic construct
  modified_base 15: mod_base = OTHER; note = thymine
  misc_feature 1..15: note = Antisense oligonucleotide
  modified_base 1: mod_base = OTHER; note = misc_feature - bicyclic nucleic acid scaffold modification
  modified_base 15: mod_base = OTHER; note = misc_feature - bicyclic nucleic acid scaffold modification
  source 1..15: mol_type = other RNA
cactttcataatgct

SEQ ID NO: 1518 - RNA, 15 nt, synthetic construct
  misc_feature 1..15: note = Antisense oligonucleotide
  modified_base 1..2: mod_base = OTHER; note = misc_feature - bicyclic nucleic acid scaffold modification
  source 1..15: mol_type = other RNA
cactttcataatgct

SEQ ID NO: 1519 - RNA, 15 nt, synthetic construct
  modified_base 15: mod_base = OTHER; note = thymine
  misc_feature 1..15: note = Antisense oligonucleotide
  modified_base 14..15: mod_base = OTHER; note = misc_feature - bicyclic nucleic acid scaffold modification
  source 1..15: mol_type = other RNA
cactttcataatgct

SEQ ID NO: 1520 - RNA, 15 nt, synthetic construct
  misc_feature 1..15: note = Antisense oligonucleotide
  source 1..15: mol_type = other RNA
tcactttcataatgc

SEQ ID NO: 1521 - RNA, 15 nt, synthetic construct
  modified_base 1: mod_base = OTHER; note = thymine
  misc_feature 1..15: note = Antisense oligonucleotide
  modified_base 1: mod_base = OTHER; note = misc_feature - bicyclic nucleic acid scaffold modification
  source 1..15: mol_type = other RNA
tcactttcataatgc

SEQ ID NO: 1522 - RNA, 15 nt, synthetic construct
  misc_feature 1..15: note = Antisense oligonucleotide
  modified_base 15: mod_base = OTHER; note = misc_feature - bicyclic nucleic acid scaffold modification
  source 1..15: mol_type = other RNA
tcactttcataatgc

SEQ ID NO: 1523 - RNA, 15 nt, synthetic construct
  modified_base 1: mod_base = OTHER; note = thymine
  misc_feature 1..15: note = Antisense oligonucleotide
  modified_base 1: mod_base = OTHER; note = misc_feature - bicyclic nucleic acid scaffold modification
  modified_base 15: mod_base = OTHER; note = misc_feature - bicyclic nucleic acid scaffold modification
  source 1..15: mol_type = other RNA
tcactttcataatgc

SEQ ID NO: 1524 - RNA, 15 nt, synthetic construct
  modified_base 1: mod_base = OTHER; note = thymine
  misc_feature 1..15: note = Antisense oligonucleotide
  modified_base 1..2: mod_base = OTHER; note = misc_feature - bicyclic nucleic acid scaffold modification
  source 1..15: mol_type = other RNA
tcactttcataatgc

SEQ ID NO: 1525 - RNA, 15 nt, synthetic construct
  misc_feature 1..15: note = Antisense oligonucleotide
  modified_base 14..15: mod_base = OTHER; note = misc_feature - bicyclic nucleic acid scaffold modification
  source 1..15: mol_type = other RNA
tcactttcataatgc

SEQ ID NO: 1526 - RNA, 15 nt, synthetic construct
  misc_feature 1..15: note = Antisense oligonucleotide
  source 1..15: mol_type = other RNA
ttcactttcataatg

SEQ ID NO: 1527 - RNA, 15 nt, synthetic construct
  modified_base 1: mod_base = OTHER; note = thymine
  misc_feature 1..15: note = Antisense oligonucleotide
  modified_base 1: mod_base = OTHER; note = misc_feature - bicyclic nucleic acid scaffold modification
  source 1..15: mol_type = other RNA
ttcactttcataatg

SEQ ID NO: 1528 - RNA, 15 nt, synthetic construct
  misc_feature 1..15: note = Antisense oligonucleotide
  modified_base 15: mod_base = OTHER; note = misc_feature - bicyclic nucleic acid scaffold modification
  source 1..15: mol_type = other RNA
ttcactttcataatg

SEQ ID NO: 1529 - RNA, 15 nt, synthetic construct
  modified_base 1: mod_base = OTHER; note = thymine
  misc_feature 1..15: note = Antisense oligonucleotide
  modified_base 1: mod_base = OTHER; note = misc_feature - bicyclic nucleic acid scaffold modification
  modified_base 15: mod_base = OTHER; note = misc_feature - bicyclic nucleic acid scaffold modification
  source 1..15: mol_type = other RNA
ttcactttcataatg

SEQ ID NO: 1530 - RNA, 15 nt, synthetic construct
  modified_base 1..2: mod_base = OTHER; note = thymine
  misc_feature 1..15: note = Antisense oligonucleotide
  modified_base 1..2: mod_base = OTHER; note = misc_feature - bicyclic nucleic acid scaffold modification
  source 1..15: mol_type = other RNA
ttcactttcataatg

SEQ ID NO: 1531 - RNA, 15 nt, synthetic construct
  modified_base 14: mod_base = OTHER; note = thymine
  misc_feature 1..15: note = Antisense oligonucleotide
  modified_base 14..15: mod_base = OTHER; note = misc_feature - bicyclic nucleic acid scaffold modification
  source 1..15: mol_type = other RNA
ttcactttcataatg

SEQ ID NO: 1532 - RNA, 15 nt, synthetic construct
  misc_feature 1..15: note = Antisense oligonucleotide
  source 1..15: mol_type = other RNA
attcactttcataat

SEQ ID NO: 1533 - RNA, 15 nt, synthetic construct
  misc_feature 1..15: note = Antisense oligonucleotide
  modified_base 1: mod_base = OTHER; note = misc_feature - bicyclic nucleic acid scaffold modification
  source 1..15: mol_type = other RNA
attcactttcataat

SEQ ID NO: 1534 - RNA, 15 nt, synthetic construct
  modified_base 15: mod_base = OTHER; note = thymine
  misc_feature 1..15: note = Antisense oligonucleotide
  modified_base 15: mod_base = OTHER; note = misc_feature - bicyclic nucleic acid scaffold modification
  source 1..15: mol_type = other RNA
attcactttcataat

SEQ ID NO: 1535 - RNA, 15 nt, synthetic construct
  modified_base 15: mod_base = OTHER; note = thymine
  misc_feature 1..15: note = Antisense oligonucleotide
  modified_base 1: mod_base = OTHER; note = misc_feature - bicyclic nucleic acid scaffold modification
  modified_base 15: mod_base = OTHER; note = misc_feature - bicyclic nucleic acid scaffold modification
  source 1..15: mol_type = other RNA
attcactttcataat

SEQ ID NO: 1536 - RNA, 15 nt, synthetic construct
  modified_base 2: mod_base = OTHER; note = thymine
  misc_feature 1..15: note = Antisense oligonucleotide
  modified_base 1..2: mod_base = OTHER; note = misc_feature - bicyclic nucleic acid scaffold modification
  source 1..15: mol_type = other RNA
attcactttcataat

SEQ ID NO: 1537 - RNA, 15 nt, synthetic construct
  modified_base 15: mod_base = OTHER; note = thymine
  misc_feature 1..15: note = Antisense oligonucleotide
  modified_base 14..15: mod_base = OTHER; note = misc_feature - bicyclic nucleic acid scaffold modification
  source 1..15: mol_type = other RNA
attcactttcataat

SEQ ID NO: 1538 - RNA, 15 nt, synthetic construct
  misc_feature 1..15: note = Antisense oligonucleotide
  source 1..15: mol_type = other RNA
gattcactttcataa

SEQ ID NO: 1539 - RNA, 15 nt, synthetic construct
  misc_feature 1..15: note = Antisense oligonucleotide
  modified_base 1: mod_base = OTHER; note = misc_feature - bicyclic nucleic acid scaffold modification
  source 1..15: mol_type = other RNA
gattcactttcataa

SEQ ID NO: 1540 - RNA, 15 nt, synthetic construct
  misc_feature 1..15: note = Antisense oligonucleotide
  modified_base 15: mod_base = OTHER; note = misc_feature - bicyclic nucleic acid scaffold modification
  source 1..15: mol_type = other RNA
gattcactttcataa

SEQ ID NO: 1541 - RNA, 15 nt, synthetic construct
  misc_feature 1..15: note = Antisense oligonucleotide
  modified_base 1: mod_base = OTHER; note = misc_feature - bicyclic nucleic acid scaffold modification
  modified_base 15: mod_base = OTHER; note = misc_feature - bicyclic nucleic acid scaffold modification
  source 1..15: mol_type = other RNA
gattcactttcataa

SEQ ID NO: 1542 - RNA, 15 nt, synthetic construct
  misc_feature 1..15: note = Antisense oligonucleotide
  modified_base 1..2: mod_base = OTHER; note = misc_feature - bicyclic nucleic acid scaffold modification
  source 1..15: mol_type = other RNA
gattcactttcataa

SEQ ID NO: 1543 - RNA, 15 nt, synthetic construct
  misc_feature 1..15: note = Antisense oligonucleotide
  modified_base 14..15: mod_base = OTHER; note = misc_feature - bicyclic nucleic acid scaffold modification
  source 1..15: mol_type = other RNA
gattcactttcataa

SEQ ID NO: 1544 - RNA, 15 nt, synthetic construct
  misc_feature 1..15: note = Antisense oligonucleotide
  source 1..15: mol_type = other RNA
agtaagattcacttt

SEQ ID NO: 1545 - RNA, 15 nt, synthetic construct
  misc_feature 1..15: note = Antisense oligonucleotide
  modified_base 1: mod_base = OTHER; note = misc_feature - bicyclic nucleic acid scaffold modification
  source 1..15: mol_type = other RNA
agtaagattcacttt

SEQ ID NO: 1546 - RNA, 15 nt, synthetic construct
  modified_base 15: mod_base = OTHER; note = thymine
  misc_feature 1..15: note = Antisense oligonucleotide
  modified_base 15: mod_base = OTHER; note = misc_feature - bicyclic nucleic acid scaffold modification
  source 1..15: mol_type = other RNA
agtaagattcacttt

SEQ ID NO: 1547 - RNA, 15 nt, synthetic construct
  modified_base 15: mod_base = OTHER; note = thymine
  misc_feature 1..15: note = Antisense oligonucleotide
  modified_base 1: mod_base = OTHER; note = misc_feature - bicyclic nucleic acid scaffold modification
  modified_base 15: mod_base = OTHER; note = misc_feature - bicyclic nucleic acid scaffold modification
  source 1..15: mol_type = other RNA
agtaagattcacttt

SEQ ID NO: 1548 - RNA, 15 nt, synthetic construct
  misc_feature 1..15: note = Antisense oligonucleotide
  modified_base 1..2: mod_base = OTHER; note = misc_feature - bicyclic nucleic acid scaffold modification
  source 1..15: mol_type = other RNA
agtaagattcacttt

SEQ ID NO: 1549 - RNA, 15 nt, synthetic construct
  modified_base 14..15: mod_base = OTHER; note = thymine
  misc_feature 1..15: note = Antisense oligonucleotide
  modified_base 14..15: mod_base = OTHER; note = misc_feature - bicyclic nucleic acid scaffold modification
  source 1..15: mol_type = other RNA
agtaagattcacttt

SEQ ID NO: 1550 - RNA, 15 nt, synthetic construct
  misc_feature 1..15: note = Antisense oligonucleotide
  source 1..15: mol_type = other RNA
acaaaagtaagattc

SEQ ID NO: 1551 - RNA, 15 nt, synthetic construct
  misc_feature 1..15: note = Antisense oligonucleotide
  modified_base 1: mod_base = OTHER; note = misc_feature - bicyclic nucleic acid scaffold modification
  source 1..15: mol_type = other RNA
acaaaagtaagattc

SEQ ID NO: 1552 - RNA, 15 nt, synthetic construct
  misc_feature 1..15: note = Antisense oligonucleotide
  modified_base 15: mod_base = OTHER; note = misc_feature - bicyclic nucleic acid scaffold modification
  source 1..15: mol_type = other RNA
acaaaagtaagattc

SEQ ID NO: 1553 - RNA, 15 nt, synthetic construct
  misc_feature 1..15: note = Antisense oligonucleotide
  modified_base 1: mod_base = OTHER; note = misc_feature - bicyclic nucleic acid scaffold modification
  modified_base 15: mod_base = OTHER; note = misc_feature - bicyclic nucleic acid scaffold modification
  source 1..15: mol_type = other RNA
acaaaagtaagattc

SEQ ID NO: 1554 - RNA, 15 nt, synthetic construct
  misc_feature 1..15: note = Antisense oligonucleotide
  modified_base 1..2: mod_base = OTHER; note = misc_feature - bicyclic nucleic acid scaffold modification
  source 1..15: mol_type = other RNA
acaaaagtaagattc

SEQ ID NO: 1555 - RNA, 15 nt, synthetic construct
  modified_base 14: mod_base = OTHER; note = thymine
  misc_feature 1..15: note = Antisense oligonucleotide
  modified_base 14..15: mod_base = OTHER; note = misc_feature - bicyclic nucleic acid scaffold modification
  source 1..15: mol_type = other RNA
acaaaagtaagattc

SEQ ID NO: 1556 - RNA, 15 nt, synthetic construct
  misc_feature 1..15: note = Antisense oligonucleotide
  source 1..15: mol_type = other RNA
gttttacaaaagtaa

SEQ ID NO: 1557 - RNA, 15 nt, synthetic construct
  misc_feature 1..15: note = Antisense oligonucleotide
  modified_base 1: mod_base = OTHER; note = misc_feature - bicyclic nucleic acid scaffold modification
  source 1..15: mol_type = other RNA
gttttacaaaagtaa

SEQ ID NO: 1558 - RNA, 15 nt, synthetic construct
  misc_feature 1..15: note = Antisense oligonucleotide
  modified_base 15: mod_base = OTHER; note = misc_feature - bicyclic nucleic acid scaffold modification
  source 1..15: mol_type = other RNA
gttttacaaaagtaa

SEQ ID NO: 1559 - RNA, 15 nt, synthetic construct
  misc_feature 1..15: note = Antisense oligonucleotide
  modified_base 1: mod_base = OTHER; note = misc_feature - bicyclic nucleic acid scaffold modification
  modified_base 15: mod_base = OTHER; note = misc_feature - bicyclic nucleic acid scaffold modification
  source 1..15: mol_type = other RNA
gttttacaaaagtaa

SEQ ID NO: 1560 - RNA, 15 nt, synthetic construct
  modified_base 2: mod_base = OTHER; note = thymine
  misc_feature 1..15: note = Antisense oligonucleotide
  modified_base 1..2: mod_base = OTHER; note = misc_feature - bicyclic nucleic acid scaffold modification
  source 1..15: mol_type = other RNA
gttttacaaaagtaa

SEQ ID NO: 1561 - RNA, 15 nt, synthetic construct
  misc_feature 1..15: note = Antisense oligonucleotide
  modified_base 14..15: mod_base = OTHER; note = misc_feature - bicyclic nucleic acid scaffold modification
  source 1..15: mol_type = other RNA
gttttacaaaagtaa

SEQ ID NO: 1562 - RNA, 15 nt, synthetic construct
  misc_feature 1..15: note = Antisense oligonucleotide
  source 1..15: mol_type = other RNA
ataaagttttacaaa

SEQ ID NO: 1563 - RNA, 15 nt, synthetic construct
  misc_feature 1..15: note = Antisense oligonucleotide
  modified_base 1: mod_base = OTHER; note = misc_feature - bicyclic nucleic acid scaffold modification
  source 1..15: mol_type = other RNA
ataaagttttacaaa

SEQ ID NO: 1564 - RNA, 15 nt, synthetic construct
  misc_feature 1..15: note = Antisense oligonucleotide
  modified_base 15: mod_base = OTHER; note = misc_feature - bicyclic nucleic acid scaffold modification
  source 1..15: mol_type = other RNA
ataaagttttacaaa

SEQ ID NO: 1565 - RNA, 15 nt, synthetic construct
  misc_feature 1..15: note = Antisense oligonucleotide
  modified_base 1: mod_base = OTHER; note = misc_feature - bicyclic nucleic acid scaffold modification
  modified_base 15: mod_base = OTHER; note = misc_feature - bicyclic nucleic acid scaffold modification
  source 1..15: mol_type = other RNA
ataaagttttacaaa

SEQ ID NO: 1566 - RNA, 15 nt, synthetic construct
  modified_base 2: mod_base = OTHER; note = thymine
  misc_feature 1..15: note = Antisense oligonucleotide
  modified_base 1..2: mod_base = OTHER; note = misc_feature - bicyclic nucleic acid scaffold modification
  source 1..15: mol_type = other RNA
ataaagttttacaaa

SEQ ID NO: 1567 - RNA, 15 nt, synthetic construct
  misc_feature 1..15: note = Antisense oligonucleotide
  modified_base 14..15: mod_base = OTHER; note = misc_feature - bicyclic nucleic acid scaffold modification
  source 1..15: mol_type = other RNA
ataaagttttacaaa

SEQ ID NO: 1568 - RNA, 15 nt, synthetic construct
  misc_feature 1..15: note = Antisense oligonucleotide
  source 1..15: mol_type = other RNA
aaaccataaagtttt

SEQ ID NO: 1569 - RNA, 15 nt, synthetic construct
  misc_feature 1..15: note = Antisense oligonucleotide
  modified_base 1: mod_base = OTHER; note = misc_feature - bicyclic nucleic acid scaffold modification
  source 1..15: mol_type = other RNA
aaaccataaagtttt

SEQ ID NO: 1570 - RNA, 15 nt, synthetic construct
  modified_base 15: mod_base = OTHER; note = thymine
  misc_feature 1..15: note = Antisense oligonucleotide
  modified_base 15: mod_base = OTHER; note = misc_feature - bicyclic nucleic acid scaffold modification
  source 1..15: mol_type = other RNA
aaaccataaagtttt

SEQ ID NO: 1571 - RNA, 15 nt, synthetic construct
  modified_base 15: mod_base = OTHER; note = thymine
  misc_feature 1..15: note = Antisense oligonucleotide
  modified_base 1: mod_base = OTHER; note = misc_feature - bicyclic nucleic acid scaffold modification
  modified_base 15: mod_base = OTHER; note = misc_feature - bicyclic nucleic acid scaffold modification
  source 1..15: mol_type = other RNA
aaaccataaagtttt

SEQ ID NO: 1572 - RNA, 15 nt, synthetic construct
  misc_feature 1..15: note = Antisense oligonucleotide
  modified_base 1..2: mod_base = OTHER; note = misc_feature - bicyclic nucleic acid scaffold modification
  source 1..15: mol_type = other RNA
aaaccataaagtttt

SEQ ID NO: 1573 - RNA, 15 nt, synthetic construct
  modified_base 14..15: mod_base = OTHER; note = thymine
  misc_feature 1..15: note = Antisense oligonucleotide
  modified_base 14..15: mod_base = OTHER; note = misc_feature - bicyclic nucleic acid scaffold modification
  source 1..15: mol_type = other RNA
aaaccataaagtttt

SEQ ID NO: 1574 - RNA, 15 nt, synthetic construct
  misc_feature 1..15: note = Antisense oligonucleotide
  source 1..15: mol_type = other RNA
tccacaaaccataaa

SEQ ID NO: 1575 - RNA, 15 nt, synthetic construct
  modified_base 1: mod_base = OTHER; note = thymine
  misc_feature 1..15: note = Antisense oligonucleotide
  modified_base 1: mod_base = OTHER; note = misc_feature - bicyclic nucleic acid scaffold modification
  source 1..15: mol_type = other RNA
tccacaaaccataaa

SEQ ID NO: 1576 - RNA, 15 nt, synthetic construct
  misc_feature 1..15: note = Antisense oligonucleotide
  modified_base 15: mod_base = OTHER; note = misc_feature - bicyclic nucleic acid scaffold modification
  source 1..15: mol_type = other RNA
tccacaaaccataaa

SEQ ID NO: 1577 - RNA, 15 nt, synthetic construct
  modified_base 1: mod_base = OTHER; note = thymine
  misc_feature 1..15: note = Antisense oligonucleotide
  modified_base 1: mod_base = OTHER; note = misc_feature - bicyclic nucleic acid scaffold modification
  modified_base 15: mod_base = OTHER; note = misc_feature - bicyclic nucleic acid scaffold modification
  source 1..15: mol_type = other RNA
tccacaaaccataaa

SEQ ID NO: 1578 - RNA, 15 nt, synthetic construct
  misc_feature 1..15: note = Antisense oligonucleotide
  modified_base 1..2: mod_base = OTHER; note = misc_feature - bicyclic nucleic acid scaffold modification
  source 1..15: mol_type = other RNA
tccacaaaccataaa

SEQ ID NO: 1579 - RNA, 15 nt, synthetic construct
  misc_feature 1..15: note = Antisense oligonucleotide
  modified_base 14..15: mod_base = OTHER; note = misc_feature - bicyclic nucleic acid scaffold modification
  source 1..15: mol_type = other RNA
tccacaaaccataaa

SEQ ID NO: 1580 - RNA, 30 nt, synthetic construct
  misc_feature 1..30: note = Antisense oligonucleotide
  source 1..30: mol_type = other RNA
ctccaacatcaaggaagatggcatttctag

SEQ ID NO: 1581 - protein, 293 aa, Homo sapiens
MAMSSGGSGGGVPEQEDSVLFRRGTGQSDDSDIWDDTALIKAYDKAVASFKHALKNGDICETSGKPKTTPKRKPAKKNKSQKKNTAASLQQWKVGDKCSAIWSEDGCIYPATIASIDFKRETCVVVYTGYGNREEQNLSDLLSPICEVANNIEQNAQENENESQVSTDESENSRSPGNKSDNIKPKSAPWNSFLPPPPPMPGPRLGPGKPGLKFNGPPPPPPPPPPHLLSCWLPPFPSGPPIIPPPPPICPDSLDDADALGSMLISWYMSGYHTGYYMGFRQNQKEGRCHSLN

SEQ ID NO: 1582 - RNA, 921 nt, Homo sapiens
  source 1..921: mol_type = unassigned RNA
atggcgatgagcagcggcggcagtggtggcggcgtcccggagcaggaggattccgtgctgttccggcgcggcacaggccagagcgatgattctgacatttgggatgatacagcactgataaaagcatatgataaagctgtggcttcatttaagcatgctctaaagaatggtgacatttgtgaaacttcgggtaaaccaaaaaccacacctaaaagaaaacctgctaagaagaataaaagccaaaagaagaatactgcagcttccttacaacagtggaaagttggggacaaatgttctgccatttggtcagaagacggttgcatttacccagctaccattgcttcaattgattttaagagagaaacctgtgttgtggtttacactggatatggaaatagagaggagcaaaatctgtccgatctactttccccaatctgtgaagtagctaataatatagaacaaaatgctcaagagaatgaaaatgaaagccaagtttcaacagatgaaagtgagaactccaggtctcctggaaataaatcagataacatcaagcccaaatctgctccatggaactcttttctccctccaccaccccccatgccagggccaagactgggaccaggaaagccaggtctaaaattcaatggcccaccaccgccaccgccaccaccaccaccccacttactatcatgctggctgcctccatttccttctggaccaccaataattcccccaccacctcccatatgtccagattctcttgatgatgctgatgctttgggaagtatgttaatttcatggtacatgagtggctatcatactggctattatatgggttttagacaaaatcaaaaagaaggaaggtgctcacattccttaaattaaggagaaatgctggcatagagcagcactaaatgacac

SEQ ID NO: 1583 - RNA, 5769 nt, synthetic construct
  misc_feature 1..5769: note = SMN2 intron 6
  source 1..5769: mol_type = other RNA
gtaagtaatcactcagcatcttttcctgacaatttttttgtagttatgtgactttgttttgtaaatttataaaatactacttgcttctctctttatattactaaaaaataaaaataaaaaaatacaactgtctgaggcttaaattactcttgcattgtccctaagtataattttagttaattttaaaaagctttcatgctattgttagattattttgattatacacttttgaattgaaattatactttttctaaataatgttttaatctctgatttgaaattgattgtagggaatggaaaagatgggataatttttcataaatgaaaaatgaaattcttttttttttttttttttttttgagacggagtcttgctctgttgcccaggctggagtgcaatggcgtgatcttggctcacagcaagctctgcctcctggattcacgccattctcctgcctcagcctcagaggtagctgggactacaggtgcctgccaccacgcctgtctaattttttgtatttttttgtaaagacagggtttcactgtgttagccaggatggtctcaatctcctgaccccgtgatccacccgcctcggccttccaagagaaatgaaatttttttaatgcacaaagatctggggtaatgtgtaccacattgaaccttggggagtatggcttcaaacttgtcactttatacgttagtctcctacggacatgttctattgtattttagtcagaacatttaaaattattttattttattttattttttttttttttttgagacggagtctcgctctgtcacccaggctggagtacagtggcgcagtctcggctcactgcaagctccgcctcccgggttcacgccattctcctgcctcagcctctccgagtagctgggactacaggcgcccgccaccacgcccggctaatttttttttatttttagtagagacggggtttcaccgtggtctcgatctcctgacctcgtgatccacccgcctcggcctcccaaagtgctgggattacaagcgtgagccaccgcgcccggcctaaaattatttttaaaagtaagctcttgtgccctgctaaaattatgatgtgatattgtaggcacttgtatttttagtaaattaatatagaagaaacaactgacttaaaggtgtatgtttttaaatgtatcatctgtgtgtgcccccattaatattcttatttaaaagttaaggccagacatggtggcttacaactgtaatcccaacagtttgtgaggccgaggcaggcagatcacttgaggtcaggagtttgagaccagcctggccaacatgatgaaaccttgtctctactaaaaataccaaaaaaaatttagccaggcatggtggcacatgcctgtaatccgagctacttgggaggctgtggcaggaaaattgctttaatctgggaggcagaggttgcagtgagttgagattgtgccactgcactccacccttggtgacagagtgagattccatctcaaaaaaagaaaaaggcctggcacggtggctcacacctataatcccagtactttgggaggtagaggcaggtggatcacttgaggttaggagttcaggaccagcctggccaacatggtgactactccatttctactaaatacacaaaacttagcccagtggcgggcagttgtaatcccagctacttgagaggttgaggcaggagaatcacttgaacctgggaggcagaggttgcagtgagccgagatcacaccgctgcactctagcctggccaacagagtgagaatttgcggagggaaaaaaaagtcacgcttcagttgttgtagtataaccttggtatattgtatgtatcatgaattcctcattttaatgaccaaaaagtaataaatcaacagcttgtaatttgttttgagatcagttatctgactgtaacactgtaggcttttgtgttttttaaattatgaaatatttgaaaaaaatacataatgtatatataaagtattggtataatttatgttctaaataactttcttgagaaataattcacatggtgtgcagtttacctttgaaagtatacaagttggctgggcacaatggctcacgcctgtaatcccagcactttgggaggccagggcaggtggatcacgaggtcaggagatcgagaccatcctggctaacatggtgaaaccccgtctctactaaaagtacaaaaacaaattagccgggcatgttggcgggcaccttttgtcccagctgctcgggaggctgaggcaggagagtggcgtgaacccaggaggtggagcttgcagtgagccgagattgtgccagtgcactccagcctgggcgacagagcgagactctgtctcaaaaaataaaataaaaaagaaagtatacaagtcagtggttttggttttcagttatgcaaccatcactacaatttaagaacattttcatcaccccaaaaagaaaccctgttaccttcattttccccagccctaggcagtcagtacactttctgtctctatgaatttgtctattttagatattatatataaacggaattatacgatatgtggtcttttgtgtctggcttctttcacttagcatgctattttcaagattcatccatgctgtagaatgcaccagtactgcattccttcttattgctgaatattctgttgtttggttatatcacattttatccattcatcagttcatggacatttaggttgtttttatttttgggctataatgaataatgttgctatgaacattcgtttgtgttctttttgtttttttggttttttgggttttttttgttttgtttttgtttttgagacagtcttgctctgtctcctaagctggagtgcagtggcatgatcttggcttactgcaagctctgcctcccgggttcacaccattctcctgcctcagcccgacaagtagctgggactacaggcgtgtgccaccatgcacggctaattttttgtatttttagtagagatggggtttcaccgtgttagccaggatggtctcgatctcctgacctcgtgatctgcctgcctaggcctcccaaagtgctgggattacaggcgtgagccactgcacctggccttaagtgtttttaatacgtcattgccttaagctaacaattcttaacctttgttctactgaagccacgtggttgagataggctctgagtctagcttttaacctctatctttttgtcttagaaatctaagcagaatgcaaatgactaagaataatgttgttgaaataacataaaataggttataactttgatactcattagtaacaaatctttcaatacatcttacggtctgttaggtgtagattagtaatgaagtgggaagccactgcaagctagtatacatgtagggaaagatagaaagcattgaagccagaagagagacagaggacatttgggctagatctgacaagaaaaacaaatgttttagtattaatttttgactttaaattttttttttatttagtgaatactggtgtttaatggtctcattttaataagtatgacacaggtagtttaaggtcatatattttatttgatgaaaataaggtataggccgggcacggtggctcacacctgtaatcccagcactttgggaggccgaggcaggcggatcacctgaggtcgggagttagagactagcctcaacatggagaaaccccgtctctactaaaaaaaatacaaaattaggcgggcgtggtggtgcatgcctgtaatcccagctactcaggaggctgaggcaggagaattgcttgaacctgggaggtggaggttgcggtgagccgagatcacctcattgcactccagcctgggcaacaagagcaaaactccatctcaaaaaaaaaaaaataaggtataagcgggctcaggaacatcattggacatactgaaagaagaaaaatcagctgggcgcagtggctcacgccggtaatcccaacactttgggaggccaaggcaggcgaatcacctgaagtcgggagttccagatcagcctgaccaacatggagaaaccctgtctctactaaaaatacaaaactagccgggcatggtggcgcatgcctgtaatcccagctacttgggaggctgaggcaggagaattgcttgaaccgagaaggcggaggttgcggtgagccaagattgcaccattgcactccagcctgggcaacaagagcgaaactccgtctcaaaaaaaaaaggaagaaaaatatttttttaaattaattagtttatttattttttaagatggagttttgccctgtcacccaggctggggtgcaatggtgcaatctcggctcactgcaacctccgcctcctgggttcaagtgattctcctgcctcagcttcccgagtagctgtgattacagccatatgccaccacgcccagccagttttgtgttttgttttgttttttgttttttttttttgagagggtgtcttgctctgtcccccaagctggagtgcagcggcgcgatcttggctcactgcaagctctgcctcccaggttcacaccattctcttgcctcagcctcccgagtagctgggactacaggtgcccgccaccacacccggctaatttttttgtgtttttagtagagatggggtttcactgtgttagccaggatggtctcgatctcctgaccttttgatccacccgcctcagcctccccaagtgctgggattataggcgtgagccactgtgcccggcctagtcttgtatttttagtagagtcgggatttctccatgttggtcaggctgttctccaaatccgacctcaggtgatccgcccgccttggcctccaaaagtgcaaggcaaggcattacaggcatgagccactgtgaccggcaatgtttttaaattttttacatttaaattttattttttagagaccaggtctcactctattgctcaggctggagtgcaagggcacattcacagctcactgcagccttgacctccagggctcaagcagtcctctcacctcagtttcccgagtagctgggactacagtgataatgccactgcacctggctaatttttatttttatttatttatttttttttgagacagagtcttgctctgtcacccaggctggagtgcagtggtgtaaatctcagctcactgcagcctccgcctcctgggttcaagtgattctcctgcctcaacctcccaagtagctgggattagaggtccccaccaccatgcctggctaattttttgtactttcagtagaaacggggttttgccatgttggccaggctgttctcgaactcctgagctcaggtgatccaactgtctcggcctcccaaagtgctgggattacaggcgtgagccactgtgcctagcctgagccaccacgccggcctaatttttaaattttttgtagagacagggtctcattatgttgcccagggtggtgtcaagctccaggtctcaagtgatccccctacctccgcctcccaaagttgtgggattgtaggcatgagccactgcaagaaaaccttaactgcagcctaataattgttttctttgggataacttttaaagtacattaaaagactatcaacttaatttctgatcatattttgttgaataaaataagtaaaatgtcttgtgaaacaaaatgctttttaacatccatataaagctatctatatatagctatctatatctatatagctattttttttaacttcctttattttccttacag

SEQ ID NO: 1584 - RNA, 54 nt, synthetic construct
  misc_feature 1..54: note = SMN2 exon 7
  source 1..54: mol_type = other RNA
ggttttagacaaaatcaaaaagaaggaaggtgctcacattccttaaattaagga

SEQ ID NO: 1585 - RNA, 444 nt, synthetic construct
  misc_feature 1..444: note = SMN2 intron 7
  source 1..444: mol_type = other RNA
gtaagtctgccagcattatgaaagtgaatcttacttttgtaaaactttatggtttgtggaaaacaaatgtttttgaacatttaaaaagttcagatgttagaaagttgaaaggttaatgtaaaacaatcaatattaaagaattttgatgccaaaactattagataaaaggttaatctacatccctactagaattctcatacttaactggttggttgtgtggaagaaacatactttcacaataaagagctttaggatatgatgccattttatatcactagtaggcagaccagcagacttttttttattgtgatatgggataacctaggcatactgcactgtacactctgacatatgaagtgctctagtcaagtttaactggtgtccacagaggacatggtttaactggaattcgtcaagcctctggttctaatttctcatttgcag

SEQ ID NO: 1586 - DNA, 26 bp, synthetic construct
  misc_feature 1..26: note = DMD 47/52 Forward primer
  source 1..26: mol_type = other DNA
tgaaaataagctcaagcagacaaatc

SEQ ID NO: 1587 - DNA, 20 bp, synthetic construct
  misc_feature 1..20: note = DMD 47/52 Reverse primer
  source 1..20: mol_type = other DNA
gacgcctctgttccaaatcc

SEQ ID NO: 1588 - DNA, 18 bp, synthetic construct
  misc_feature 1..18: note = DMD 47/52 Probe
  source 1..18: mol_type = other DNA
cagtggataaaggcaaca

SEQ ID NO: 1589 - DNA, 21 bp, synthetic construct
  misc_feature 1..21: note = DMD 51/52 Forward primer
  source 1..21: mol_type = other DNA
gtgatggtgggtgaccttgag

SEQ ID NO: 1590 - DNA, 20 bp, synthetic construct
  misc_feature 1..20: note = DMD 51/52 Reverse primer
  source 1..20: mol_type = other DNA
gacgcctctgttccaaatcc

SEQ ID NO: 1591 - DNA, 17 bp, synthetic construct
  misc_feature 1..17: note = DMD 51/52 Probe
  source 1..17: mol_type = other DNA
caagcagaaggcaacaa

SEQ ID NO: 1592 - RNA, 20 nt, synthetic construct
  source 1..20: mol_type = other RNA; note = Antisense oligonucleotide
  misc_difference 1: note = misc_feature - thymidine with BNA scaffold modification or uridine with BNA scaffold modification
  modified_base 2: mod_base = OTHER; note = misc_feature - 2'-O-methyl-5-methylcytidine
  modified_base 3: mod_base = OTHER; note = misc_feature - 2'-O-methyladenosine
  modified_base 4: mod_base = OTHER; note = misc_feature - 2'-O-methyladenosine
  modified_base 5: mod_base = OTHER; note = misc_feature - 2'-O-methylguanosine
  modified_base 6: mod_base = OTHER; note = misc_feature - 2'-O-methylguanosine
  modified_base 7: mod_base = OTHER; note = misc_feature - 2'-O-methyladenosine
  modified_base 8: mod_base = OTHER; note = misc_feature - 2'-O-methyladenosine
  modified_base 9: mod_base = OTHER; note = misc_feature - 2'-O-methylguanosine
  modified_base 10: mod_base = OTHER; note = misc_feature - 2'-O-methyladenosine
  modified_base 11: mod_base = OTHER; note = misc_feature - 2'-O-methyluridine
  modified_base 12: mod_base = OTHER; note = misc_feature - 2'-O-methylguanosine
  modified_base 13: mod_base = OTHER; note = misc_feature - 2'-O-methylguanosine
  modified_base 14: mod_base = OTHER; note = misc_feature - 2'-O-methyl-5-methylcytidine
  modified_base 15: mod_base = OTHER; note = misc_feature - 2'-O-methyladenosine
  modified_base 16: mod_base = OTHER; note = misc_feature - 2'-O-methyluridine
  modified_base 17: mod_base = OTHER; note = misc_feature - 2'-O-methyluridine
  modified_base 18: mod_base = OTHER; note = misc_feature - 2'-O-methyluridine
  modified_base 19: mod_base = OTHER; note = misc_feature - 2'-O-methyl-5-methylcytidine
  modified_base 20: mod_base = OTHER; note = misc_feature - 2'-O-methyluridine
ncaaggaagatggcatttct

SEQ ID NO: 1593 - RNA, 20 nt, synthetic construct
  source 1..20: mol_type = other RNA; note = Antisense oligonucleotide
  misc_difference 1: note = misc_feature - thymidine with BNA scaffold modification or uridine with BNA scaffold modification
  modified_base 2: mod_base = OTHER; note = misc_feature - 2'-O-methyl-5-methylcytidine
  modified_base 3: mod_base = OTHER; note = misc_feature - 2'-O-methyladenosine
  modified_base 4: mod_base = OTHER; note = misc_feature - 2'-O-methyladenosine
  modified_base 5: mod_base = OTHER; note = misc_feature - 2'-O-methylguanosine
  modified_base 6: mod_base = OTHER; note = misc_feature - 2'-O-methylguanosine
  modified_base 7: mod_base = OTHER; note = misc_feature - 2'-O-methyladenosine
  modified_base 8: mod_base = OTHER; note = misc_feature - 2'-O-methyladenosine
  modified_base 9: mod_base = OTHER; note = misc_feature - 2'-O-methylguanosine
  modified_base 10: mod_base = OTHER; note = misc_feature - 2'-O-methyladenosine
  modified_base 11: mod_base = OTHER; note = misc_feature - 2'-O-methyluridine
  modified_base 12: mod_base = OTHER; note = misc_feature - 2'-O-methylguanosine
  modified_base 13: mod_base = OTHER; note = misc_feature - 2'-O-methylguanosine
  modified_base 14: mod_base = OTHER; note = misc_feature - 2'-O-methyl-5-methylcytidine
  modified_base 15: mod_base = OTHER; note = misc_feature - 2'-O-methyladenosine
  modified_base 16: mod_base = OTHER; note = misc_feature - 2'-O-methyluridine
  modified_base 17: mod_base = OTHER; note = misc_feature - 2'-O-methyluridine
  modified_base 18: mod_base = OTHER; note = misc_feature - 2'-O-methyluridine
  modified_base 19: mod_base = OTHER; note = misc_feature - 2'-O-methyl-5-methylcytidine
  misc_difference 20: note = misc_feature - thymidine with BNA scaffold modification or uridine with BNA scaffold modification
ncaaggaagatggcatttcn

SEQ ID NO: 1594 - RNA, 20 nt, synthetic construct
  source 1..20: mol_type = other RNA; note = Antisense oligonucleotide
  misc_difference 1: note = misc_feature - thymidine with BNA scaffold modification or uridine with BNA scaffold modification
  modified_base 2: mod_base = OTHER; note = misc_feature - 5-methylcytidine with BNA scaffold modification
  modified_base 3: mod_base = OTHER; note = misc_feature - 2'-O-methyladenosine
  modified_base 4: mod_base = OTHER; note = misc_feature - 2'-O-methyladenosine
  modified_base 5: mod_base = OTHER; note = misc_feature - 2'-O-methylguanosine
  modified_base 6: mod_base = OTHER; note = misc_feature - 2'-O-methylguanosine
  modified_base 7: mod_base = OTHER; note = misc_feature - 2'-O-methyladenosine
  modified_base 8: mod_base = OTHER; note = misc_feature - 2'-O-methyladenosine
  modified_base 9: mod_base = OTHER; note = misc_feature - 2'-O-methylguanosine
  modified_base 10: mod_base = OTHER; note = misc_feature - 2'-O-methyladenosine
  modified_base 11: mod_base = OTHER; note = misc_feature - 2'-O-methyluridine
  modified_base 12: mod_base = OTHER; note = misc_feature - 2'-O-methylguanosine
  modified_base 13: mod_base = OTHER; note = misc_feature - 2'-O-methylguanosine
  modified_base 14: mod_base = OTHER; note = misc_feature - 2'-O-methyl-5-methylcytidine
  modified_base 15: mod_base = OTHER; note = misc_feature - 2'-O-methyladenosine
  modified_base 16: mod_base = OTHER; note = misc_feature - 2'-O-methyluridine
  modified_base 17: mod_base = OTHER; note = misc_feature - 2'-O-methyluridine
  modified_base 18: mod_base = OTHER; note = misc_feature - 2'-O-methyluridine
  modified_base 19: mod_base = OTHER; note = misc_feature - 2'-O-methyl-5-methylcytidine
  modified_base 20: mod_base = OTHER; note = misc_feature - 2'-O-methyluridine
ncaaggaagatggcatttct

SEQ ID NO: 1595 - RNA, 22 nt, synthetic construct
  source 1..22: mol_type = other RNA; note = Antisense oligonucleotide
  misc_difference 1: note = misc_feature - thymidine with BNA scaffold modification or uridine with BNA scaffold modification
  modified_base 2: mod_base = OTHER; note = misc_feature - 2'-O-methyl-5-methylcytidine
  modified_base 3: mod_base = OTHER; note = misc_feature - 2'-O-methyladenosine
  modified_base 4: mod_base = OTHER; note = misc_feature - 2'-O-methyladenosine
  modified_base 5: mod_base = OTHER; note = misc_feature - 2'-O-methylguanosine
  modified_base 6: mod_base = OTHER; note = misc_feature - 2'-O-methylguanosine
  modified_base 7: mod_base = OTHER; note = misc_feature - 2'-O-methyladenosine
  modified_base 8: mod_base = OTHER; note = misc_feature - 2'-O-methyladenosine
  modified_base 9: mod_base = OTHER; note = misc_feature - 2'-O-methylguanosine
  modified_base 10: mod_base = OTHER; note = misc_feature - 2'-O-methyladenosine
  modified_base 11: mod_base = OTHER; note = misc_feature - 2'-O-methyluridine
  modified_base 12: mod_base = OTHER; note = misc_feature - 2'-O-methylguanosine
  modified_base 13: mod_base = OTHER; note = misc_feature - 2'-O-methylguanosine
  modified_base 14: mod_base = OTHER; note = misc_feature - 2'-O-methyl-5-methylcytidine
  modified_base 15: mod_base = OTHER; note = misc_feature - 2'-O-methyladenosine
  modified_base 16: mod_base = OTHER; note = misc_feature - 2'-O-methyluridine
  modified_base 17: mod_base = OTHER; note = misc_feature - 2'-O-methyluridine
  modified_base 18: mod_base = OTHER; note = misc_feature - 2'-O-methyluridine
  modified_base 19: mod_base = OTHER; note = misc_feature - 2'-O-methyl-5-methylcytidine
  modified_base 20: mod_base = OTHER; note = misc_feature - 2'-O-methyluridine
  modified_base 21: mod_base = OTHER; note = misc_feature - 2'-O-methyladenosine
  modified_base 22: mod_base = OTHER; note = misc_feature - 2'-O-methylguanosine
ncaaggaagatggcatttctag

SEQ ID NO: 1596 - RNA, 22 nt, synthetic construct
  source 1..22: mol_type = other RNA; note = Antisense oligonucleotide
  misc_difference 1: note = misc_feature - thymidine with BNA scaffold modification or uridine with BNA scaffold modification
  modified_base 2: mod_base = OTHER; note = misc_feature - 2'-O-methyl-5-methylcytidine
  modified_base 3: mod_base = OTHER; note = misc_feature - 2'-O-methyladenosine
  modified_base 4: mod_base = OTHER; note = misc_feature - 2'-O-methyladenosine
  modified_base 5: mod_base = OTHER; note = misc_feature - 2'-O-methylguanosine
  modified_base 6: mod_base = OTHER; note = misc_feature - 2'-O-methylguanosine
  modified_base 7: mod_base = OTHER; note = misc_feature - 2'-O-methyladenosine
  modified_base 8: mod_base = OTHER; note = misc_feature - 2'-O-methyladenosine
  modified_base 9: mod_base = OTHER; note = misc_feature - 2'-O-methylguanosine
  modified_base 10: mod_base = OTHER; note = misc_feature - 2'-O-methyladenosine
  modified_base 11: mod_base = OTHER; note = misc_feature - 2'-O-methyluridine
  modified_base 12: mod_base = OTHER; note = misc_feature - 2'-O-methylguanosine
  modified_base 13: mod_base = OTHER; note = misc_feature - 2'-O-methylguanosine
  modified_base 14: mod_base = OTHER; note = misc_feature - 2'-O-methyl-5-methylcytidine
  modified_base 15: mod_base = OTHER; note = misc_feature - 2'-O-methyladenosine
  modified_base 16: mod_base = OTHER; note = misc_feature - 2'-O-methyluridine
  modified_base 17: mod_base = OTHER; note = misc_feature - 2'-O-methyluridine
  modified_base 18: mod_base = OTHER; note = misc_feature - 2'-O-methyluridine
  modified_base 19: mod_base = OTHER; note = misc_feature - 2'-O-methyl-5-methylcytidine
  modified_base 20: mod_base = OTHER; note = misc_feature - 2'-O-methyluridine
  modified_base 21: mod_base = OTHER; note = misc_feature - 2'-O-methyladenosine
  modified_base 22: mod_base = OTHER; note = misc_feature - guanosine with BNA scaffold modification
ncaaggaagatggcatttctag

SEQ ID NO: 1597 - RNA, 22 nt, synthetic construct
  source 1..22: mol_type = other RNA; note = Antisense oligonucleotide
  misc_difference 1: note = misc_feature - thymidine with BNA scaffold modification or uridine with BNA scaffold modification
  modified_base 2: mod_base = OTHER; note = misc_feature - 5-methylcytidine with BNA scaffold modification
  modified_base 3: mod_base = OTHER; note = misc_feature - 2'-O-methyladenosine
  modified_base 4: mod_base = OTHER; note = misc_feature - 2'-O-methyladenosine
  modified_base 5: mod_base = OTHER; note = misc_feature - 2'-O-methylguanosine
  modified_base 6: mod_base = OTHER; note = misc_feature - 2'-O-methylguanosine
  modified_base 7: mod_base = OTHER; note = misc_feature - 2'-O-methyladenosine
  modified_base 8: mod_base = OTHER; note = misc_feature - 2'-O-methyladenosine
  modified_base 9: mod_base = OTHER; note = misc_feature - 2'-O-methylguanosine
  modified_base 10: mod_base = OTHER; note = misc_feature - 2'-O-methyladenosine
  modified_base 11: mod_base = OTHER; note = misc_feature - 2'-O-methyluridine
  modified_base 12: mod_base = OTHER; note = misc_feature - 2'-O-methylguanosine
  modified_base 13: mod_base = OTHER; note = misc_feature - 2'-O-methylguanosine
  modified_base 14: mod_base = OTHER; note = misc_feature - 2'-O-methyl-5-methylcytidine
  modified_base 15: mod_base = OTHER; note = misc_feature - 2'-O-methyladenosine
  modified_base 16: mod_base = OTHER; note = misc_feature - 2'-O-methyluridine
  modified_base 17: mod_base = OTHER; note = misc_feature - 2'-O-methyluridine
  modified_base 18: mod_base = OTHER; note = misc_feature - 2'-O-methyluridine
  modified_base 19: mod_base = OTHER; note = misc_feature - 2'-O-methyl-5-methylcytidine
  modified_base 20: mod_base = OTHER; note = misc_feature - 2'-O-methyluridine
  modified_base 21: mod_base = OTHER; note = misc_feature - 2'-O-methyladenosine
  modified_base 22: mod_base = OTHER; note = misc_feature - 2'-O-methylguanosine
ncaaggaagatggcatttctag

SEQ ID NO: 1598 - RNA, 18 nt, synthetic construct
  source 1..18: mol_type = other RNA; note = Antisense oligonucleotide
  modified_base 1: mod_base = OTHER; note = misc_feature - adenosine with BNA scaffold modification
  modified_base 2: mod_base = OTHER; note = misc_feature - 2'-O-methyladenosine
  modified_base 3: mod_base = OTHER; note = misc_feature - 2'-O-methylguanosine
  modified_base 4: mod_base = OTHER; note = misc_feature - 2'-O-methylguanosine
  modified_base 5: mod_base = OTHER; note = misc_feature - 2'-O-methyladenosine
  modified_base 6: mod_base = OTHER; note = misc_feature - 2'-O-methyladenosine
  modified_base 7: mod_base = OTHER; note = misc_feature - 2'-O-methylguanosine
  modified_base 8: mod_base = OTHER; note = misc_feature - 2'-O-methyladenosine
  modified_base 9: mod_base = OTHER; note = misc_feature - 2'-O-methyluridine
  modified_base 10: mod_base = OTHER; note = misc_feature - 2'-O-methylguanosine
  modified_base 11: mod_base = OTHER; note = misc_feature - 2'-O-methylguanosine
  modified_base 12: mod_base = OTHER; note = misc_feature - 2'-O-methyl-5-methylcytidine
  modified_base 13: mod_base = OTHER; note = misc_feature - 2'-O-methyladenosine
  modified_base 14: mod_base = OTHER; note = misc_feature - 2'-O-methyluridine
  modified_base 15: mod_base = OTHER; note = misc_feature - 2'-O-methyluridine
  modified_base 16: mod_base = OTHER; note = misc_feature - 2'-O-methyluridine
  modified_base 17: mod_base = OTHER; note = misc_feature - 2'-O-methyl-5-methylcytidine
  modified_base 18: mod_base = OTHER; note = misc_feature - 2'-O-methyluridine
aaggaagatggcatttct

SEQ ID NO: 1599 - RNA, 18 nt, synthetic construct
  source 1..18: mol_type = other RNA; note = Antisense oligonucleotide
  modified_base 1: mod_base = OTHER; note = misc_feature - adenosine with BNA scaffold modification
  modified_base 2: mod_base = OTHER; note = misc_feature - 2'-O-methyladenosine
  modified_base 3: mod_base = OTHER; note = misc_feature - 2'-O-methylguanosine
  modified_base 4: mod_base = OTHER; note = misc_feature - 2'-O-methylguanosine
  modified_base 5: mod_base = OTHER; note = misc_feature - 2'-O-methyladenosine
  modified_base 6: mod_base = OTHER; note = misc_feature - 2'-O-methyladenosine
  modified_base 7: mod_base = OTHER; note = misc_feature - 2'-O-methylguanosine
  modified_base 8: mod_base = OTHER; note = misc_feature - 2'-O-methyladenosine
  modified_base 9: mod_base = OTHER; note = misc_feature - 2'-O-methyluridine
  modified_base 10: mod_base = OTHER; note = misc_feature - 2'-O-methylguanosine
  modified_base 11: mod_base = OTHER; note = misc_feature - 2'-O-methylguanosine
  modified_base 12: mod_base = OTHER; note = misc_feature - 2'-O-methyl-5-methylcytidine
  modified_base 13: mod_base = OTHER; note = misc_feature - 2'-O-methyladenosine
  modified_base 14: mod_base = OTHER; note = misc_feature - 2'-O-methyluridine
  modified_base 15: mod_base = OTHER; note = misc_feature - 2'-O-methyluridine
  modified_base 16: mod_base = OTHER; note = misc_feature - 2'-O-methyluridine
  modified_base 17: mod_base = OTHER; note = misc_feature - 2'-O-methyl-5-methylcytidine
  misc_difference 18: note = misc_feature - thymidine with BNA scaffold modification or uridine with BNA scaffold modification
aaggaagatggcatttcn

SEQ ID NO: 1600 - RNA, 18 nt, synthetic construct
  source 1..18: mol_type = other RNA; note = Antisense oligonucleotide
  modified_base 1: mod_base = OTHER; note = misc_feature - adenosine with BNA scaffold modification
  modified_base 2: mod_base = OTHER; note = misc_feature - adenosine with BNA scaffold modification
  modified_base 3: mod_base = OTHER; note = misc_feature - 2'-O-methylguanosine
  modified_base 4: mod_base = OTHER; note = misc_feature - 2'-O-methylguanosine
  modified_base 5: mod_base = OTHER; note = misc_feature - 2'-O-methyladenosine
  modified_base 6: mod_base = OTHER; note = misc_feature - 2'-O-methyladenosine
  modified_base 7: mod_base = OTHER; note = misc_feature - 2'-O-methylguanosine
  modified_base 8: mod_base = OTHER; note = misc_feature - 2'-O-methyladenosine
  modified_base 9: mod_base = OTHER; note = misc_feature - 2'-O-methyluridine
  modified_base 10: mod_base = OTHER; note = misc_feature - 2'-O-methylguanosine
  modified_base 11: mod_base = OTHER; note = misc_feature - 2'-O-methylguanosine
  modified_base 12: mod_base = OTHER; note = misc_feature - 2'-O-methyl-5-methylcytidine
  modified_base 13: mod_base = OTHER; note = misc_feature - 2'-O-methyladenosine
  modified_base 14: mod_base = OTHER; note = misc_feature - 2'-O-methyluridine
  modified_base 15: mod_base = OTHER; note = misc_feature - 2'-O-methyluridine
  modified_base 16: mod_base = OTHER; note = misc_feature - 2'-O-methyluridine
  modified_base 17: mod_base = OTHER; note = misc_feature - 2'-O-methyl-5-methylcytidine
  modified_base 18: mod_base = OTHER; note = misc_feature - 2'-O-methyluridine
aaggaagatggcatttct

SEQ ID NO: 1601 - RNA, 16 nt, synthetic construct
  source 1..16: mol_type = other RNA; note = Antisense oligonucleotide
  modified_base 1: mod_base = OTHER; note = misc_feature - guanosine with BNA scaffold modification
  modified_base 2: mod_base = OTHER; note = misc_feature - 2'-O-methylguanosine
  modified_base 3: mod_base = OTHER; note = misc_feature - 2'-O-methyladenosine
  modified_base 4: mod_base = OTHER; note = misc_feature - 2'-O-methyladenosine
  modified_base 5: mod_base = OTHER; note = misc_feature - 2'-O-methylguanosine
  modified_base 6: mod_base = OTHER; note = misc_feature - 2'-O-methyladenosine
  modified_base 7: mod_base = OTHER; note = misc_feature - 2'-O-methyluridine
  modified_base 8: mod_base = OTHER; note = misc_feature - 2'-O-methylguanosine
  modified_base 9: mod_base = OTHER; note = misc_feature - 2'-O-methylguanosine
  modified_base 10: mod_base = OTHER; note = misc_feature - 2'-O-methyl-5-methylcytidine
  modified_base 11: mod_base = OTHER; note = misc_feature - 2'-O-methyladenosine
  modified_base 12: mod_base = OTHER; note = misc_feature - 2'-O-methyluridine
  modified_base 13: mod_base = OTHER; note = misc_feature - 2'-O-methyluridine
  modified_base 14: mod_base = OTHER; note = misc_feature - 2'-O-methyluridine
  modified_base 15: mod_base = OTHER; note = misc_feature - 2'-O-methyl-5-methylcytidine
  modified_base 16: mod_base = OTHER; note = misc_feature - 2'-O-methyluridine
ggaagatggcatttct

SEQ ID NO: 1602 - RNA, 16 nt, synthetic construct
  source 1..16: mol_type = other RNA; note = Antisense oligonucleotide
  modified_base 1: mod_base = OTHER; note = misc_feature - guanosine with BNA scaffold modification
  modified_base 2: mod_base = OTHER; note = misc_feature - 2'-O-methylguanosine
  modified_base 3: mod_base = OTHER; note = misc_feature - 2'-O-methyladenosine
  modified_base 4: mod_base = OTHER; note = misc_feature - 2'-O-methyladenosine
  modified_base 5: mod_base = OTHER; note = misc_feature - 2'-O-methylguanosine
  modified_base 6: mod_base = OTHER; note = misc_feature - 2'-O-methyladenosine
  modified_base 7: mod_base = OTHER; note = misc_feature - 2'-O-methyluridine
  modified_base 8: mod_base = OTHER; note = misc_feature - 2'-O-methylguanosine
  modified_base 9: mod_base = OTHER; note = misc_feature - 2'-O-methylguanosine
  modified_base 10: mod_base = OTHER; note = misc_feature - 2'-O-methyl-5-methylcytidine
  modified_base 11: mod_base = OTHER; note = misc_feature - 2'-O-methyladenosine
  modified_base 12: mod_base = OTHER; note = misc_feature - 2'-O-methyluridine
  modified_base 13: mod_base = OTHER; note = misc_feature - 2'-O-methyluridine
  modified_base 14: mod_base = OTHER; note = misc_feature - 2'-O-methyluridine
  modified_base 15: mod_base = OTHER; note = misc_feature - 2'-O-methyl-5-methylcytidine
  misc_difference 16: note = misc_feature - thymidine with BNA scaffold modification or uridine with BNA scaffold modification
ggaagatggcatttcn

SEQ ID NO: 1603 - RNA, 16 nt, synthetic construct
  source 1..16: mol_type = other RNA; note = Antisense oligonucleotide
  modified_base 1: mod_base = OTHER; note = misc_feature - guanosine with BNA scaffold modification
  modified_base 2: mod_base = OTHER; note = misc_feature - guanosine with BNA scaffold modification
  modified_base 3: mod_base = OTHER; note = misc_feature - 2'-O-methyladenosine
  modified_base 4: mod_base = OTHER; note = misc_feature - 2'-O-methyladenosine
  modified_base 5: mod_base = OTHER; note = misc_feature - 2'-O-methylguanosine
  modified_base 6: mod_base = OTHER; note = misc_feature - 2'-O-methyladenosine
  modified_base 7: mod_base = OTHER; note = misc_feature - 2'-O-methyluridine
  modified_base 8: mod_base = OTHER; note = misc_feature - 2'-O-methylguanosine
  modified_base 9: mod_base = OTHER; note = misc_feature - 2'-O-methylguanosine
  modified_base 10: mod_base = OTHER; note = misc_feature - 2'-O-methyl-5-methylcytidine
  modified_base 11: mod_base = OTHER; note = misc_feature - 2'-O-methyladenosine
  modified_base 12: mod_base = OTHER; note = misc_feature - 2'-O-methyluridine
  modified_base 13: mod_base = OTHER; note = misc_feature - 2'-O-methyluridine
  modified_base 14: mod_base = OTHER; note = misc_feature - 2'-O-methyluridine
  modified_base 15: mod_base = OTHER; note = misc_feature - 2'-O-methyl-5-methylcytidine
  modified_base 16: mod_base = OTHER; note = misc_feature - 2'-O-methyluridine
ggaagatggcatttct

SEQ ID NO: 1604 - RNA, 16 nt, synthetic construct
  source 1..16: mol_type = other RNA; note = Antisense oligonucleotide
  misc_difference 1: note = misc_feature - thymidine with BNA scaffold modification or uridine with BNA scaffold modification
  modified_base 2: mod_base = OTHER; note = misc_feature - 2'-O-methyl-5-methylcytidine
  modified_base 3: mod_base = OTHER; note = misc_feature - 2'-O-methyladenosine
  modified_base 4: mod_base = OTHER; note = misc_feature - 2'-O-methyladenosine
  modified_base 5: mod_base = OTHER; note = misc_feature - 2'-O-methylguanosine
  modified_base 6: mod_base = OTHER; note = misc_feature - 2'-O-methylguanosine
  modified_base 7: mod_base = OTHER; note = misc_feature - 2'-O-methyladenosine
  modified_base 8: mod_base = OTHER; note = misc_feature - 2'-O-methyladenosine
  modified_base 9: mod_base = OTHER; note = misc_feature - 2'-O-methylguanosine
  modified_base 10: mod_base = OTHER; note = misc_feature - 2'-O-methyladenosine
  modified_base 11: mod_base = OTHER; note = misc_feature - 2'-O-methyluridine
  modified_base 12: mod_base = OTHER; note = misc_feature - 2'-O-methylguanosine
  modified_base 13: mod_base = OTHER; note = misc_feature - 2'-O-methylguanosine
  modified_base 14: mod_base = OTHER; note = misc_feature - 2'-O-methyl-5-methylcytidine
  modified_base 15: mod_base = OTHER; note = misc_feature - 2'-O-methyladenosine
  modified_base 16: mod_base = OTHER; note = misc_feature - 2'-O-methyluridine
ncaaggaagatggcat

SEQ ID NO: 1605 - RNA, 16 nt, synthetic construct
  source 1..16: mol_type = other RNA; note = Antisense oligonucleotide
  misc_difference 1: note = misc_feature - thymidine with BNA scaffold modification or uridine with BNA scaffold modification
  modified_base 2: mod_base = OTHER; note = misc_feature - 5-methylcytidine with BNA scaffold modification
  modified_base 3: mod_base = OTHER; note = misc_feature - 2'-O-methyladenosine
  modified_base 4: mod_base = OTHER; note = misc_feature - 2'-O-methyladenosine
  modified_base 5: mod_base = OTHER; note = misc_feature - 2'-O-methylguanosine
  modified_base 6: mod_base = OTHER; note = misc_feature - 2'-O-methylguanosine
  modified_base 7: mod_base = OTHER; note = misc_feature - 2'-O-methyladenosine
  modified_base 8: mod_base = OTHER; note = misc_feature - 2'-O-methyladenosine
  modified_base 9: mod_base = OTHER; note = misc_feature - 2'-O-methylguanosine
  modified_base 10: mod_base = OTHER; note = misc_feature - 2'-O-methyladenosine
  modified_base 11: mod_base = OTHER; note = misc_feature - 2'-O-methyluridine
  modified_base 12: mod_base = OTHER; note = misc_feature - 2'-O-methylguanosine
  modified_base 13: mod_base = OTHER; note = misc_feature - 2'-O-methylguanosine
  modified_base 14: mod_base = OTHER; note = misc_feature - 2'-O-methyl-5-methylcytidine
  modified_base 15: mod_base = OTHER; note = misc_feature - 2'-O-methyladenosine
  modified_base 16: mod_base = OTHER; note = misc_feature - 2'-O-methyluridine
ncaaggaagatggcat

SEQ ID NO: 1606 - RNA, 18 nt, synthetic construct
  source 1..18: mol_type = other RNA; note = Antisense oligonucleotide
  modified_base 1: mod_base = OTHER; note = misc_feature - 2'-O-methyluridine
  modified_base 2: mod_base = OTHER; note = misc_feature - 2'-O-methyl-5-methylcytidine
  modified_base 3: mod_base = OTHER; note = misc_feature - 2'-O-methyladenosine
  modified_base 4: mod_base = OTHER; note = misc_feature - 2'-O-methyl-5-methylcytidine
  modified_base 5: mod_base = OTHER; note = misc_feature - 2'-O-methyluridine
  modified_base 6: mod_base = OTHER; note = misc_feature - 2'-O-methyluridine
  modified_base 7: mod_base = OTHER; note = misc_feature - 2'-O-methyluridine
  modified_base 8: mod_base = OTHER; note = misc_feature - 2'-O-methyl-5-methylcytidine
  modified_base 9: mod_base = OTHER; note = misc_feature - 2'-O-methyladenosine
  modified_base 10: mod_base = OTHER; note = misc_feature - 2'-O-methyluridine
  modified_base 11: mod_base = OTHER; note = misc_feature - 2'-O-methyladenosine
  modified_base 12: mod_base = OTHER; note = misc_feature - 2'-O-methyladenosine
  modified_base 13: mod_base = OTHER; note = misc_feature - 2'-O-methyluridine
  modified_base 14: mod_base = OTHER; note = misc_feature - 2'-O-methylguanosine
  modified_base 15: mod_base = OTHER; note = misc_feature - 2'-O-methyl-5-methylcytidine
  modified_base 16: mod_base = OTHER; note = misc_feature - 2'-O-methyluridine
  modified_base 17: mod_base = OTHER; note = misc_feature - 2'-O-methylguanosine
  modified_base 18: mod_base = OTHER; note = misc_feature - 2'-O-methylguanosine
tcactttcataatgctgg

SEQ ID NO: 1607 - RNA, 30 nt, synthetic construct; identical to SEQ ID NO: 1580
  source 1..30: mol_type = other RNA; note = Antisense oligonucleotide
  modified_base 1: mod_base = OTHER; note = misc_feature - 2'-O-methylcytidine
  modified_base 2: mod_base = OTHER; note = misc_feature - 2'-O-methyluridine
  modified_base 3: mod_base = OTHER; note = misc_feature - 2'-O-methylcytidine
  modified_base 4: mod_base = OTHER; note = misc_feature - 2'-O-methylcytidine
  modified_base 5: mod_base = OTHER; note = misc_feature - 2'-O-methyladenosine
  modified_base 6: mod_base = OTHER; note = misc_feature - 2'-O-methyladenosine
  modified_base 7: mod_base = OTHER; note = misc_feature - 2'-O-methylcytidine
  modified_base 8: mod_base = OTHER; note = misc_feature - 2'-O-methyladenosine
  modified_base 9: mod_base = OTHER; note = misc_feature - 2'-O-methyluridine
  modified_base 10: mod_base = OTHER; note = misc_feature - 2'-O-methylcytidine
  modified_base 11: mod_base = OTHER; note = misc_feature - 2'-O-methyladenosine
  modified_base 12: mod_base = OTHER; note = misc_feature - 2'-O-methyladenosine
  modified_base 13: mod_base = OTHER; note = misc_feature - 2'-O-methylguanosine
  modified_base 14: mod_base = OTHER; note = misc_feature - 2'-O-methylguanosine
  modified_base 15: mod_base = OTHER; note = misc_feature - 2'-O-methyladenosine
  modified_base 16: mod_base = OTHER; note = misc_feature - 2'-O-methyladenosine
  modified_base 17: mod_base = OTHER; note = misc_feature - 2'-O-methylguanosine
  modified_base 18: mod_base = OTHER; note = misc_feature - 2'-O-methyladenosine
  modified_base 19: mod_base = OTHER; note = misc_feature - 2'-O-methyluridine
  modified_base 20: mod_base = OTHER; note = misc_feature - 2'-O-methylguanosine
  modified_base 21: mod_base = OTHER; note = misc_feature - 2'-O-methylguanosine
  modified_base 22: mod_base = OTHER; note = misc_feature - 2'-O-methylcytidine
  modified_base 23: mod_base = OTHER; note = misc_feature - 2'-O-methyladenosine
  modified_base 24: mod_base = OTHER; note = misc_feature - 2'-O-methyluridine
  modified_base 25: mod_base = OTHER; note = misc_feature - 2'-O-methyluridine
  modified_base 26: mod_base = OTHER; note = misc_feature - 2'-O-methyluridine
  modified_base 27: mod_base = OTHER; note = misc_feature - 2'-O-methylcytidine
  modified_base 28: mod_base = OTHER; note = misc_feature - 2'-O-methyluridine
  modified_base 29: mod_base = OTHER; note = misc_feature - 2'-O-methyladenosine
  modified_base 30: mod_base = OTHER; note = misc_feature - 2'-O-methylguanosine

SEQ ID NO: 1608 - RNA, 20 nt, synthetic construct
  modified_base 1: mod_base = OTHER; note = thymine
  misc_feature 1..20: note = Antisense oligonucleotide
  modified_base 1..2: mod_base = OTHER; note = misc_feature - bicyclic nucleic acid scaffold modification
  modified_base 20: mod_base = OTHER; note = misc_feature - bicyclic nucleic acid scaffold modification
  source 1..20: mol_type = other RNA
tcagcttctgttagccactg

SEQ ID NO: 1609 - RNA, 20 nt, synthetic construct
  modified_base 1: mod_base = OTHER; note = thymine
  misc_feature 1..20: note = Antisense oligonucleotide
  modified_base 1: mod_base = OTHER; note = misc_feature - bicyclic nucleic acid scaffold modification
  modified_base 4: mod_base = OTHER; note = misc_feature - bicyclic nucleic acid scaffold modification
  modified_base 20: mod_base = OTHER; note = misc_feature - bicyclic nucleic acid scaffold modification
  source 1..20: mol_type = other RNA
tcagcttctgttagccactg

SEQ ID NO: 1610 - RNA, 20 nt, synthetic construct
  modified_base 1: mod_base = OTHER; note = thymine
  misc_feature 1..20: note = Antisense oligonucleotide
  modified_base 1: mod_base = OTHER; note = misc_feature - bicyclic nucleic acid scaffold modification
  modified_base 5: mod_base = OTHER; note = misc_feature - bicyclic nucleic acid scaffold modification
  modified_base 20: mod_base = OTHER; note = misc_feature - bicyclic nucleic acid scaffold modification
  source 1..20: mol_type = other RNA
tcagcttctgttagccactg

SEQ ID NO: 1611 - RNA, 20 nt, synthetic construct
  modified_base 1: mod_base = OTHER; note = thymine
  misc_feature 1..20: note = Antisense oligonucleotide
  modified_base 1: mod_base = OTHER; note = misc_feature - bicyclic nucleic acid scaffold modification
  modified_base 8: mod_base = OTHER; note = misc_feature - bicyclic nucleic acid scaffold modification
  modified_base 20: mod_base = OTHER; note = misc_feature - bicyclic nucleic acid scaffold modification
  source 1..20: mol_type = other RNA
tcagcttctgttagccactg

SEQ ID NO: 1612 - RNA, 20 nt, synthetic construct
  modified_base 1: mod_base = OTHER; note = thymine
  misc_feature 1..20: note = Antisense oligonucleotide
  modified_base 1: mod_base = OTHER; note = misc_feature - bicyclic nucleic acid scaffold modification
  modified_base 10: mod_base = OTHER; note = misc_feature - bicyclic nucleic acid scaffold modification
  modified_base 20: mod_base = OTHER; note = misc_feature - bicyclic nucleic acid scaffold modification
  source 1..20: mol_type = other RNA
tcagcttctgttagccactg

SEQ ID NO: 1613 - RNA, 20 nt, synthetic construct
  modified_base 1: mod_base = OTHER; note = thymine
  modified_base 19: mod_base = OTHER; note = thymine
  misc_feature 1..20: note = Antisense oligonucleotide
  modified_base 1..2: mod_base = OTHER; note = misc_feature - bicyclic nucleic acid scaffold modification
  modified_base 19..20: mod_base = OTHER; note = misc_feature - bicyclic nucleic acid scaffold modification
  source 1..20: mol_type = other RNA
tcagcttctgttagccactg

SEQ ID NO: 1614 - RNA, 20 nt, synthetic construct
  modified_base 1: mod_base = OTHER; note = thymine
  modified_base 19: mod_base = OTHER; note = thymine
  misc_feature 1..20: note = Antisense oligonucleotide
  modified_base 1: mod_base = OTHER; note = misc_feature - bicyclic nucleic acid scaffold modification
  modified_base 10: mod_base = OTHER; note = misc_feature - bicyclic nucleic acid scaffold modification
  modified_base 19..20: mod_base = OTHER; note = misc_feature - bicyclic nucleic acid scaffold modification
  source 1..20: mol_type = other RNA
tcagcttctgttagccactg

SEQ ID NO: 1615 - RNA, 20 nt, synthetic construct
  modified_base 1: mod_base = OTHER; note = thymine
  misc_feature 1..20: note = Antisense oligonucleotide
  modified_base 1: mod_base = OTHER; note = misc_feature - bicyclic nucleic acid scaffold modification
  modified_base 18: mod_base = OTHER; note = misc_feature - bicyclic nucleic acid scaffold modification
  modified_base 20: mod_base = OTHER; note = misc_feature - bicyclic nucleic acid scaffold modification
  source 1..20: mol_type = other RNA
tcagcttctgttagccactg

SEQ ID NO: 1616 - RNA, 20 nt, synthetic construct
  modified_base 1: mod_base = OTHER; note = thymine
  modified_base 19: mod_base = OTHER; note = thymine
  misc_feature 1..20: note = Antisense oligonucleotide
  modified_base 1: mod_base = OTHER; note = misc_feature - bicyclic nucleic acid scaffold modification
  modified_base 4: mod_base = OTHER; note = misc_feature - bicyclic nucleic acid scaffold modification
  modified_base 10: mod_base = OTHER; note = misc_feature - bicyclic nucleic acid scaffold modification
  modified_base 19..20: mod_base = OTHER; note = misc_feature - bicyclic nucleic acid scaffold modification
  source 1..20: mol_type = other RNA
tcagcttctgttagccactg

SEQ ID NO: 1617 - RNA, 20 nt, synthetic construct
  modified_base 1: mod_base = OTHER; note = thymine
  misc_feature 1..20: note = Antisense oligonucleotide
  modified_base 1: mod_base = OTHER; note = misc_feature - bicyclic nucleic acid scaffold modification
  modified_base 4: mod_base = OTHER; note = misc_feature - bicyclic nucleic acid scaffold modification
  modified_base 8: mod_base = OTHER; note = misc_feature - bicyclic nucleic acid scaffold modification
  modified_base 10: mod_base = OTHER; note = misc_feature - bicyclic nucleic acid scaffold modification
  modified_base 20: mod_base = OTHER; note = misc_feature - bicyclic nucleic acid scaffold modification
  source 1..20: mol_type = other RNA
tcagcttctgttagccactg

SEQ ID NO: 1618 - RNA, 18 nt, synthetic construct
  modified_base 1: mod_base = OTHER; note = thymine
  misc_feature 1..18: note = Antisense oligonucleotide
  modified_base 1: mod_base = OTHER; note = misc_feature - bicyclic nucleic acid scaffold modification
  modified_base 17..18: mod_base = OTHER; note = misc_feature - bicyclic nucleic acid scaffold modification
  source 1..18: mol_type = other RNA
tcagcttctgttagccac

SEQ ID NO: 1619 - RNA, 18 nt, synthetic construct
  modified_base 1: mod_base = OTHER; note = thymine
  misc_feature 1..18: note = Antisense oligonucleotide
  modified_base 1..2: mod_base = OTHER; note = misc_feature - bicyclic nucleic acid scaffold modification
  modified_base 18: mod_base = OTHER; note = misc_feature - bicyclic nucleic acid scaffold modification
  source 1..18: mol_type = other RNA
tcagcttctgttagccac

SEQ ID NO: 1620 - RNA, 18 nt, synthetic construct
  modified_base 1: mod_base = OTHER; note = thymine
  misc_feature 1..18: note = Antisense oligonucleotide
  modified_base 1: mod_base = OTHER; note = misc_feature - bicyclic nucleic acid scaffold modification
  modified_base 4: mod_base = OTHER; note = misc_feature - bicyclic nucleic acid scaffold modification
  modified_base 18: mod_base = OTHER; note = misc_feature - bicyclic nucleic acid scaffold modification
  source 1..18: mol_type = other RNA
tcagcttctgttagccac

SEQ ID NO: 1621 - RNA, 18 nt, synthetic construct
  modified_base 1: mod_base = OTHER; note = thymine
  misc_feature 1..18: note = Antisense oligonucleotide
  modified_base 1: mod_base = OTHER; note = misc_feature - bicyclic nucleic acid scaffold modification
  modified_base 8: mod_base = OTHER; note = misc_feature - bicyclic nucleic acid scaffold modification
  modified_base 18: mod_base = OTHER; note = misc_feature - bicyclic nucleic acid scaffold modification
  source 1..18: mol_type = other RNA
tcagcttctgttagccac

SEQ ID NO: 1622 - RNA, 18 nt, synthetic construct
  modified_base 1: mod_base = OTHER; note = thymine
  misc_feature 1..18: note = Antisense oligonucleotide
  modified_base 1: mod_base = OTHER; note = misc_feature - bicyclic nucleic acid scaffold modification
  modified_base 10: mod_base = OTHER; note = misc_feature - bicyclic nucleic acid scaffold modification
  modified_base 18: mod_base = OTHER; note = misc_feature - bicyclic nucleic acid scaffold modification
  source 1..18: mol_type = other RNA
tcagcttctgttagccac

SEQ ID NO: 1623 - RNA, 18 nt, synthetic construct
  modified_base 1: mod_base = OTHER; note = thymine
  misc_feature 1..18: note = Antisense oligonucleotide
  modified_base 1..2: mod_base = OTHER; note = misc_feature - bicyclic nucleic acid scaffold modification
  modified_base 17..18: mod_base = OTHER; note = misc_feature - bicyclic nucleic acid scaffold modification
  source 1..18: mol_type = other RNA
tcagcttctgttagccac

SEQ ID NO: 1624 - RNA, 18 nt, synthetic construct
  modified_base 1: mod_base = OTHER; note = thymine
  misc_feature 1..18: note = Antisense oligonucleotide
  modified_base 1: mod_base = OTHER; note = misc_feature - bicyclic nucleic acid scaffold modification
  modified_base 10: mod_base = OTHER; note = misc_feature - bicyclic nucleic acid scaffold modification
  modified_base 17..18: mod_base = OTHER; note = misc_feature - bicyclic nucleic acid scaffold modification
  source 1..18: mol_type = other RNA
tcagcttctgttagccac

SEQ ID NO: 1625 - RNA, 18 nt, synthetic construct
  modified_base 1: mod_base = OTHER; note = thymine
  misc_feature 1..18: note = Antisense oligonucleotide
  modified_base 1: mod_base = OTHER; note = misc_feature - bicyclic nucleic acid scaffold modification
  modified_base 5: mod_base = OTHER; note = misc_feature - bicyclic nucleic acid scaffold modification
  modified_base 14: mod_base = OTHER; note = misc_feature - bicyclic nucleic acid scaffold modification
  modified_base 18: mod_base = OTHER; note = misc_feature - bicyclic nucleic acid scaffold modification
  source 1..18: mol_type = other RNA
tcagcttctgttagccac

SEQ ID NO: 1626 - RNA, 18 nt, synthetic construct
  modified_base 1: mod_base = OTHER; note = thymine
  misc_feature 1..18: note = Antisense oligonucleotide
  modified_base 1: mod_base = OTHER; note = misc_feature - bicyclic nucleic acid scaffold modification
  modified_base 5: mod_base = OTHER; note = misc_feature - bicyclic nucleic acid scaffold modification
  modified_base 10: mod_base = OTHER; note = misc_feature - bicyclic nucleic acid scaffold modification
  modified_base 14: mod_base = OTHER; note = misc_feature - bicyclic nucleic acid scaffold modification
  modified_base 18: mod_base = OTHER; note = misc_feature - bicyclic nucleic acid scaffold modification
  source 1..18: mol_type = other RNA
tcagcttctgttagccac

SEQ ID NO: 1627 - RNA, 18 nt, synthetic construct
  modified_base 18: mod_base = OTHER; note = thymine
  misc_feature 1..18: note = Antisense oligonucleotide
  modified_base 1: mod_base = OTHER; note = misc_feature - bicyclic nucleic acid scaffold modification
  modified_base 17..18: mod_base = OTHER; note = misc_feature - bicyclic nucleic acid scaffold modification
  source 1..18: mol_type = other RNA
cagcttctgttagccact

SEQ ID NO: 1628 - RNA, 18 nt, synthetic construct
  modified_base 18: mod_base = OTHER; note = thymine
  misc_feature 1..18: note = Antisense oligonucleotide
  modified_base 1: mod_base = OTHER; note = misc_feature - bicyclic nucleic acid scaffold modification
  modified_base 4: mod_base = OTHER; note = misc_feature - bicyclic nucleic acid scaffold modification
  modified_base 18: mod_base = OTHER; note = misc_feature - bicyclic nucleic acid scaffold modification
  source 1..18: mol_type = other RNA
cagcttctgttagccact

SEQ ID NO: 1629 - RNA, 18 nt, synthetic construct
  modified_base 18: mod_base = OTHER; note = thymine
  misc_feature 1..18: note = Antisense oligonucleotide
  modified_base 1: mod_base = OTHER; note = misc_feature - bicyclic nucleic acid scaffold modification
  modified_base 7: mod_base = OTHER; note = misc_feature - bicyclic nucleic acid scaffold modification
  modified_base 18: mod_base = OTHER; note = misc_feature - bicyclic nucleic acid scaffold modification
  source 1..18: mol_type = other RNA
cagcttctgttagccact

SEQ ID NO: 1630 - RNA, 18 nt, synthetic construct
  modified_base 18: mod_base = OTHER; note = thymine
  misc_feature 1..18: note = Antisense oligonucleotide
  modified_base 1: mod_base = OTHER; note = misc_feature - bicyclic nucleic acid scaffold modification
  modified_base 9: mod_base = OTHER; note = misc_feature - bicyclic nucleic acid scaffold modification
  modified_base 18: mod_base = OTHER; note = misc_feature - bicyclic nucleic acid scaffold modification
  source 1..18: mol_type = other RNA
cagcttctgttagccact

SEQ ID NO: 1631 - RNA, 18 nt, synthetic construct
  modified_base 18: mod_base = OTHER; note = thymine
  misc_feature 1..18: note = Antisense oligonucleotide
  modified_base 1: mod_base = OTHER; note = misc_feature - bicyclic nucleic acid scaffold modification
  modified_base 13: mod_base = OTHER; note = misc_feature - bicyclic nucleic acid scaffold modification
  modified_base 18: mod_base = OTHER; note = misc_feature - bicyclic nucleic acid scaffold modification
  source 1..18: mol_type = other RNA
cagcttctgttagccact

SEQ ID NO: 1632 - RNA, 18 nt, synthetic construct
  modified_base 18: mod_base = OTHER; note = thymine
  misc_feature 1..18: note = Antisense oligonucleotide
  modified_base 1: mod_base = OTHER; note = misc_feature - bicyclic nucleic acid scaffold modification
  modified_base 15: mod_base = OTHER; note = misc_feature - bicyclic nucleic acid scaffold modification
  modified_base 18: mod_base = OTHER; note = misc_feature - bicyclic nucleic acid scaffold modification
  source 1..18: mol_type = other RNA
cagcttctgttagccact

SEQ ID NO: 1633 - RNA, 18 nt, synthetic construct
  modified_base 18: mod_base = OTHER; note = thymine
  misc_feature 1..18: note = Antisense oligonucleotide
  modified_base 1: mod_base = OTHER; note = misc_feature - bicyclic nucleic acid scaffold modification
  modified_base 7: mod_base = OTHER; note = misc_feature - bicyclic nucleic acid scaffold modification
  modified_base 17..18: mod_base = OTHER; note = misc_feature - bicyclic nucleic acid scaffold modification
  source 1..18: mol_type = other RNA
cagcttctgttagccact

SEQ ID NO: 1634 - RNA, 18 nt, synthetic construct
  modified_base 18: mod_base = OTHER; note = thymine
  misc_feature 1..18: note = Antisense oligonucleotide
  modified_base 1: mod_base = OTHER; note = misc_feature - bicyclic nucleic acid scaffold modification
  modified_base 4: mod_base = OTHER; note = misc_feature - bicyclic nucleic acid scaffold modification
  modified_base 14: mod_base = OTHER; note = misc_feature - bicyclic nucleic acid scaffold modification
  modified_base 18: mod_base = OTHER; note = misc_feature - bicyclic nucleic acid scaffold modification
  source 1..18: mol_type = other RNA
cagcttctgttagccact

SEQ ID NO: 1635 - RNA, 18 nt, synthetic construct
  modified_base 18: mod_base = OTHER; note = thymine
  misc_feature 1..18: note = Antisense oligonucleotide
  modified_base 1: mod_base = OTHER; note = misc_feature - bicyclic nucleic acid scaffold modification
  modified_base 4: mod_base = OTHER; note = misc_feature - bicyclic nucleic acid scaffold modification
  modified_base 9: mod_base = OTHER; note = misc_feature - bicyclic nucleic acid scaffold modification
  modified_base 14: mod_base = OTHER; note = misc_feature - bicyclic nucleic acid scaffold modification
  modified_base 18: mod_base = OTHER; note = misc_feature - bicyclic nucleic acid scaffold modification
  source 1..18: mol_type = other RNA
cagcttctgttagccact

SEQ ID NO: 1636 - RNA, 18 nt, synthetic construct
  misc_feature 1..18: note = Antisense oligonucleotide
  modified_base 1: mod_base = OTHER; note = misc_feature - bicyclic nucleic acid scaffold modification
  modified_base 18: mod_base = OTHER; note = misc_feature - bicyclic nucleic acid scaffold modification
  source 1..18: mol_type = other RNA
agcttctgttagccactg

SEQ ID NO: 1637 - RNA, 18 nt, synthetic construct
  misc_feature 1..18: note = Antisense oligonucleotide
  modified_base 1: mod_base = OTHER; note = misc_feature - bicyclic nucleic acid scaffold modification
  modified_base 3: mod_base = OTHER; note = misc_feature - bicyclic nucleic acid scaffold modification
  modified_base 18: mod_base = OTHER; note = misc_feature - bicyclic nucleic acid scaffold modification
  source 1..18: mol_type = other RNA
agcttctgttagccactg

SEQ ID NO: 1638 - RNA, 18 nt, synthetic construct
  misc_feature 1..18: note = Antisense oligonucleotide
  modified_base 1: mod_base = OTHER; note = misc_feature - bicyclic nucleic acid scaffold modification
  modified_base 6: mod_base = OTHER; note = misc_feature - bicyclic nucleic acid scaffold modification
  modified_base 18: mod_base = OTHER; note = misc_feature - bicyclic nucleic acid scaffold modification
  source 1..18: mol_type = other RNA
agcttctgttagccactg

SEQ ID NO: 1639 - RNA, 18 nt, synthetic construct
  misc_feature 1..18: note = Antisense oligonucleotide
  modified_base 1: mod_base = OTHER; note = misc_feature - bicyclic nucleic acid scaffold modification
  modified_base 8: mod_base = OTHER; note = misc_feature - bicyclic nucleic acid scaffold modification
  modified_base 18: mod_base = OTHER; note = misc_feature - bicyclic nucleic acid scaffold modification
  source 1..18: mol_type = other RNA
agcttctgttagccactg

SEQ ID NO: 1640 - RNA, 18 nt, synthetic construct
  misc_feature 1..18: note = Antisense oligonucleotide
  modified_base 1: mod_base = OTHER; note = misc_feature - bicyclic nucleic acid scaffold modification
  modified_base 12: mod_base = OTHER; note = misc_feature - bicyclic nucleic acid scaffold modification
  modified_base 18: mod_base = OTHER; note = misc_feature - bicyclic nucleic acid scaffold modification
  source 1..18: mol_type = other RNA
agcttctgttagccactg

SEQ ID NO: 1641 - RNA, 18 nt, synthetic construct
  misc_feature 1..18: note = Antisense oligonucleotide
  modified_base 1: mod_base = OTHER; note = misc_feature - bicyclic nucleic acid scaffold modification
  modified_base 14: mod_base = OTHER; note = misc_feature - bicyclic nucleic acid scaffold modification
  modified_base 18: mod_base = OTHER; note = misc_feature - bicyclic nucleic acid scaffold modification
  source 1..18: mol_type = other RNA
agcttctgttagccactg

SEQ ID NO: 1642 - RNA, 18 nt, synthetic construct
  misc_feature 1..18: note = Antisense oligonucleotide
  modified_base 1: mod_base = OTHER; note = misc_feature - bicyclic nucleic acid scaffold modification
  modified_base 16: mod_base = OTHER; note = misc_feature - bicyclic nucleic acid scaffold modification
  modified_base 18: mod_base = OTHER; note = misc_feature - bicyclic nucleic acid scaffold modification
  source 1..18: mol_type = other RNA
agcttctgttagccactg

SEQ ID NO: 1643 - RNA, 18 nt, synthetic construct
  modified_base 17: mod_base = OTHER; note = thymine
  misc_feature 1..18: note = Antisense oligonucleotide
  modified_base 1..2: mod_base = OTHER; note = misc_feature - bicyclic nucleic acid scaffold modification
  modified_base 17..18: mod_base = OTHER; note = misc_feature - bicyclic nucleic acid scaffold modification
  source 1..18: mol_type = other RNA
agcttctgttagccactg

SEQ ID NO: 1644 - RNA, 18 nt, synthetic construct
  misc_feature 1..18: note = Antisense oligonucleotide
  modified_base 1: mod_base = OTHER; note = misc_feature - bicyclic nucleic acid scaffold modification
  modified_base 6: mod_base = OTHER; note = misc_feature - bicyclic nucleic acid scaffold modification
  modified_base 13: mod_base = OTHER; note = misc_feature - bicyclic nucleic acid scaffold modification
  modified_base 18: mod_base = OTHER; note = misc_feature - bicyclic nucleic acid scaffold modification
  source 1..18: mol_type = other RNA
agcttctgttagccactg

SEQ ID NO: 1645 - RNA, 18 nt, synthetic construct
  misc_feature 1..18: note = Antisense oligonucleotide
  modified_base 1: mod_base = OTHER; note = misc_feature - bicyclic nucleic acid scaffold modification
  modified_base 6: mod_base = OTHER; note = misc_feature - bicyclic nucleic acid scaffold modification
  modified_base 8: mod_base = OTHER; note = misc_feature - bicyclic nucleic acid scaffold modification
  modified_base 13: mod_base = OTHER; note = misc_feature - bicyclic nucleic acid scaffold modification
  modified_base 18: mod_base = OTHER; note = misc_feature - bicyclic nucleic acid scaffold modification
  source 1..18: mol_type = other RNA
agcttctgttagccactg

SEQ ID NO: 1646 - RNA, 16 nt, synthetic construct
  modified_base 1: mod_base = OTHER; note = thymine
  misc_feature 1..16: note = Antisense oligonucleotide
  modified_base 1: mod_base = OTHER; note = misc_feature - bicyclic nucleic acid scaffold modification
  modified_base 16: mod_base = OTHER; note = misc_feature - bicyclic nucleic acid scaffold modification
  source 1..16: mol_type = other RNA
tcagcttctgttagcc

SEQ ID NO: 1647 - RNA, 16 nt, synthetic construct
  modified_base 1: mod_base = OTHER; note = thymine
  misc_feature 1..16: note = Antisense oligonucleotide
  modified_base 1: mod_base = OTHER; note = misc_feature - bicyclic nucleic acid scaffold modification
  modified_base 4: mod_base = OTHER; note = misc_feature - bicyclic nucleic acid scaffold modification
  modified_base 16: mod_base = OTHER; note = misc_feature - bicyclic nucleic acid scaffold modification
  source 1..16: mol_type = other RNA
tcagcttctgttagcc

SEQ ID NO: 1648 - RNA, 16 nt, synthetic construct
  modified_base 1: mod_base = OTHER; note = thymine
  misc_feature 1..16: note = Antisense oligonucleotide
  modified_base 1: mod_base = OTHER; note = misc_feature - bicyclic nucleic acid scaffold modification
  modified_base 8: mod_base = OTHER; note = misc_feature - bicyclic nucleic acid scaffold modification
  modified_base 16: mod_base = OTHER; note = misc_feature - bicyclic nucleic acid scaffold modification
  source 1..16: mol_type = other RNA
tcagcttctgttagcc

SEQ ID NO: 1649 - RNA, 16 nt, synthetic construct
  modified_base 1: mod_base = OTHER; note = thymine
  misc_feature 1..16: note = Antisense oligonucleotide
  modified_base 1: mod_base = OTHER; note = misc_feature - bicyclic nucleic acid scaffold modification
  modified_base 10: mod_base = OTHER; note = misc_feature - bicyclic nucleic acid scaffold modification
  modified_base 16: mod_base = OTHER; note = misc_feature - bicyclic nucleic acid scaffold modification
  source 1..16: mol_type = other RNA
tcagcttctgttagcc

SEQ ID NO: 1650 - RNA, 16 nt, synthetic construct
  modified_base 1: mod_base = OTHER; note = thymine
  misc_feature 1..16: note = Antisense oligonucleotide
  modified_base 1: mod_base = OTHER; note = misc_feature - bicyclic nucleic acid scaffold modification
  modified_base 14: mod_base = OTHER; note = misc_feature - bicyclic nucleic acid scaffold modification
  modified_base 16: mod_base = OTHER; note = misc_feature - bicyclic nucleic acid scaffold modification
  source 1..16: mol_type = other RNA
tcagcttctgttagcc

SEQ ID NO: 1651 - RNA, 16 nt, synthetic construct
  modified_base 1: mod_base = OTHER; note = thymine
  misc_feature 1..16: note = Antisense oligonucleotide
  modified_base 1..2: mod_base = OTHER; note = misc_feature - bicyclic nucleic acid scaffold modification
  modified_base 10: mod_base = OTHER; note = misc_feature - bicyclic nucleic acid scaffold modification
  modified_base 16: mod_base = OTHER; note = misc_feature - bicyclic nucleic acid scaffold modification
  source 1..16: mol_type = other RNA
tcagcttctgttagcc

SEQ ID NO: 1652 - RNA, 16 nt, synthetic construct
  modified_base 1: mod_base = OTHER; note = thymine
  misc_feature 1..16: note = Antisense oligonucleotide
  modified_base 1..2: mod_base = OTHER; note = misc_feature - bicyclic nucleic acid scaffold modification
  modified_base 15..16: mod_base = OTHER; note = misc_feature - bicyclic nucleic acid scaffold modification
  source 1..16: mol_type = other RNA
tcagcttctgttagcc

SEQ ID NO: 1653 - RNA, 16 nt, synthetic construct
  modified_base 1: mod_base = OTHER; note = thymine
  misc_feature 1..16: note = Antisense oligonucleotide
  modified_base 1: mod_base = OTHER; note = misc_feature - bicyclic nucleic acid scaffold modification
  modified_base 4: mod_base = OTHER; note = misc_feature - bicyclic nucleic acid scaffold modification
  modified_base 10: mod_base = OTHER; note = misc_feature - bicyclic nucleic acid scaffold modification
  modified_base 16: mod_base = OTHER; note = misc_feature - bicyclic nucleic acid scaffold modification
  source 1..16: mol_type = other RNA
tcagcttctgttagcc

SEQ ID NO: 1654 - RNA, 16 nt, synthetic construct
  modified_base 1: mod_base = OTHER; note = thymine
  misc_feature 1..16: note = Antisense oligonucleotide
  modified_base 1: mod_base = OTHER; note = misc_feature - bicyclic nucleic acid scaffold modification
  modified_base 4: mod_base = OTHER; note = misc_feature - bicyclic nucleic acid scaffold modification
  modified_base 10: mod_base = OTHER; note = misc_feature - bicyclic nucleic acid scaffold modification
  modified_base 14: mod_base = OTHER; note = misc_feature - bicyclic nucleic acid scaffold modification
  modified_base 16: mod_base = OTHER; note = misc_feature - bicyclic nucleic acid scaffold modification
  source 1..16: mol_type = other RNA
tcagcttctgttagcc

SEQ ID NO: 1655 - RNA, 16 nt, synthetic construct
  modified_base 1: mod_base = OTHER; note = thymine
  misc_feature 1..16: note = Antisense oligonucleotide
  modified_base 1..2: mod_base = OTHER; note = misc_feature - bicyclic nucleic acid scaffold modification
  modified_base 8: mod_base = OTHER; note = misc_feature - bicyclic nucleic acid scaffold modification
  modified_base 15..16: mod_base = OTHER; note = misc_feature - bicyclic nucleic acid scaffold modification
  source 1..16: mol_type = other RNA
tcagcttctgttagcc

SEQ ID NO: 1656 - RNA, 16 nt, synthetic construct
  misc_feature 1..16: note = Antisense oligonucleotide
  modified_base 1: mod_base = OTHER; note = misc_feature - bicyclic nucleic acid scaffold modification
  modified_base 16: mod_base = OTHER; note = misc_feature - bicyclic nucleic acid scaffold modification
  source 1..16: mol_type = other RNA
cagcttctgttagcca

SEQ ID NO: 1657 - RNA, 16 nt, synthetic construct
  misc_feature 1..16: note = Antisense oligonucleotide
  modified_base 1: mod_base = OTHER; note = misc_feature - bicyclic nucleic acid scaffold modification
  modified_base 3: mod_base = OTHER; note = misc_feature - bicyclic nucleic acid scaffold modification
  modified_base 16: mod_base = OTHER; note = misc_feature - bicyclic nucleic acid scaffold modification
  source 1..16: mol_type = other RNA
cagcttctgttagcca

SEQ ID NO: 1658 - RNA, 16 nt, synthetic construct
  misc_feature 1..16: note = Antisense oligonucleotide
  modified_base 1: mod_base = OTHER; note = misc_feature - bicyclic nucleic acid scaffold modification
  modified_base 7: mod_base = OTHER; note = misc_feature - bicyclic nucleic acid scaffold modification
  modified_base 16: mod_base = OTHER; note = misc_feature - bicyclic nucleic acid scaffold modification
  source 1..16: mol_type = other RNA
cagcttctgttagcca

SEQ ID NO: 1659 - RNA, 16 nt, synthetic construct
  misc_feature 1..16: note = Antisense oligonucleotide
  modified_base 1: mod_base = OTHER; note = misc_feature - bicyclic nucleic acid scaffold modification
  modified_base 9: mod_base = OTHER; note = misc_feature - bicyclic nucleic acid scaffold modification
  modified_base 16: mod_base = OTHER; note = misc_feature - bicyclic nucleic acid scaffold modification
  source 1..16: mol_type = other RNA
cagcttctgttagcca

SEQ ID NO: 1660 - RNA, 16 nt, synthetic construct
  misc_feature 1..16: note = Antisense oligonucleotide
  modified_base 1: mod_base = OTHER; note = misc_feature - bicyclic nucleic acid scaffold modification
  modified_base 13: mod_base = OTHER; note = misc_feature - bicyclic nucleic acid scaffold modification
  modified_base 16: mod_base = OTHER; note = misc_feature - bicyclic nucleic acid scaffold modification
  source 1..16: mol_type = other RNA
cagcttctgttagcca

SEQ ID NO: 1661 - RNA, 16 nt, synthetic construct
  misc_feature 1..16: note = Antisense oligonucleotide
  modified_base 1: mod_base = OTHER; note = misc_feature - bicyclic nucleic acid scaffold modification
  modified_base 3: mod_base = OTHER; note = misc_feature - bicyclic nucleic acid scaffold modification
  modified_base 9: mod_base = OTHER; note = misc_feature - bicyclic nucleic acid scaffold modification
  modified_base 16: mod_base = OTHER; note = misc_feature - bicyclic nucleic acid scaffold modification
  source 1..16: mol_type = other RNA
cagcttctgttagcca

SEQ ID NO: 1662 - RNA, 16 nt, synthetic construct
  misc_feature 1..16: note = Antisense oligonucleotide
  modified_base 1: mod_base = OTHER; note = misc_feature - bicyclic nucleic acid scaffold modification
  modified_base 3: mod_base = OTHER; note = misc_feature - bicyclic nucleic acid scaffold modification
  modified_base 9: mod_base = OTHER; note = misc_feature - bicyclic nucleic acid scaffold modification
  modified_base 13: mod_base = OTHER; note = misc_feature - bicyclic nucleic acid scaffold modification
  modified_base 16: mod_base = OTHER; note = misc_feature - bicyclic nucleic acid scaffold modification
  source 1..16: mol_type = other RNA
cagcttctgttagcca

SEQ ID NO: 1663 - RNA, 16 nt, synthetic construct
  misc_feature 1..16: note = Antisense oligonucleotide
  modified_base 1: mod_base = OTHER; note = misc_feature - bicyclic nucleic acid scaffold modification
  modified_base 4: mod_base = OTHER; note = misc_feature - bicyclic nucleic acid scaffold modification
  modified_base 14: mod_base = OTHER; note = misc_feature - bicyclic nucleic acid scaffold modification
  modified_base 16: mod_base = OTHER; note = misc_feature - bicyclic nucleic acid scaffold modification
  source 1..16: mol_type = other RNA
cagcttctgttagcca

SEQ ID NO: 1664 - RNA, 16 nt, synthetic construct
  misc_feature 1..16: note = Antisense oligonucleotide
  modified_base 1: mod_base = OTHER; note = misc_feature - bicyclic nucleic acid scaffold modification
  modified_base 4: mod_base = OTHER; note = misc_feature - bicyclic nucleic acid scaffold modification
  modified_base 7: mod_base = OTHER; note = misc_feature - bicyclic nucleic acid scaffold modification
  modified_base 14: mod_base = OTHER; note = misc_feature - bicyclic nucleic acid scaffold modification
  modified_base 16: mod_base = OTHER; note = misc_feature - bicyclic nucleic acid scaffold modification
  source 1..16: mol_type = other RNA
cagcttctgttagcca

SEQ ID NO: 1665 - RNA, 16 nt, synthetic construct
  misc_feature 1..16: note = Antisense oligonucleotide
  modified_base 1: mod_base = OTHER; note = misc_feature - bicyclic nucleic acid scaffold modification
  modified_base 7: mod_base = OTHER; note = misc_feature - bicyclic nucleic acid scaffold modification
  modified_base 9: mod_base = OTHER; note = misc_feature - bicyclic nucleic acid scaffold modification
  modified_base 16: mod_base = OTHER; note = misc_feature - bicyclic nucleic acid scaffold modification
  source 1..16: mol_type = other RNA
cagcttctgttagcca

SEQ ID NO: 1666 - RNA, 16 nt, synthetic construct
  misc_feature 1..16: note = Antisense oligonucleotide
  modified_base 1: mod_base = OTHER; note = misc_feature - bicyclic nucleic acid scaffold modification
  modified_base 16: mod_base = OTHER; note = misc_feature - bicyclic nucleic acid scaffold modification
  source 1..16: mol_type = other RNA
agcttctgttagccac

SEQ ID NO: 1667 - RNA, 16 nt, synthetic construct
  misc_feature 1..16: note = Antisense oligonucleotide
  modified_base 1..2: mod_base = OTHER; note = misc_feature - bicyclic nucleic acid scaffold modification
  modified_base 16: mod_base = OTHER; note = misc_feature - bicyclic nucleic acid scaffold modification
  source 1..16: mol_type = other RNA
agcttctgttagccac

SEQ ID NO: 1668 - RNA, 16 nt, synthetic construct
  misc_feature 1..16: note = Antisense oligonucleotide
  modified_base 1: mod_base = OTHER; note = misc_feature - bicyclic nucleic acid scaffold modification
  modified_base 3: mod_base = OTHER; note = misc_feature - bicyclic nucleic acid scaffold modification
  modified_base 16: mod_base = OTHER; note = misc_feature - bicyclic nucleic acid scaffold modification
  source 1..16: mol_type = other RNA
agcttctgttagccac

SEQ ID NO: 1669 - RNA, 16 nt, synthetic construct
  misc_feature 1..16: note = Antisense oligonucleotide
  modified_base 1: mod_base = OTHER; note = misc_feature - bicyclic nucleic acid scaffold modification
  modified_base 6: mod_base = OTHER; note = misc_feature - bicyclic nucleic acid scaffold modification
  modified_base 16: mod_base = OTHER; note = misc_feature - bicyclic nucleic acid scaffold modification
  source 1..16: mol_type = other RNA
agcttctgttagccac

SEQ ID NO: 1670 - RNA, 16 nt, synthetic construct
  misc_feature 1..16: note = Antisense oligonucleotide
  modified_base 1: mod_base = OTHER; note = misc_feature - bicyclic nucleic acid scaffold modification
  modified_base 8: mod_base = OTHER; note = misc_feature - bicyclic nucleic acid scaffold modification
  modified_base 16: mod_base = OTHER; note = misc_feature - bicyclic nucleic acid scaffold modification
  source 1..16: mol_type = other RNA
agcttctgttagccac

SEQ ID NO: 1671 - RNA, 16 nt, synthetic construct
  misc_feature 1..16: note = Antisense oligonucleotide
  modified_base 1: mod_base = OTHER; note = misc_feature - bicyclic nucleic acid scaffold modification
  modified_base 12: mod_base = OTHER; note = misc_feature - bicyclic nucleic acid scaffold modification
  modified_base 16: mod_base = OTHER; note = misc_feature - bicyclic nucleic acid scaffold modification
  source 1..16: mol_type = other RNA
agcttctgttagccac

SEQ ID NO: 1672 - RNA, 16 nt, synthetic construct
  misc_feature 1..16: note = Antisense oligonucleotide
  modified_base 1: mod_base = OTHER; note = misc_feature - bicyclic nucleic acid scaffold modification
  modified_base 14: mod_base = OTHER; note = misc_feature - bicyclic nucleic acid scaffold modification
  modified_base 16: mod_base = OTHER; note = misc_feature - bicyclic nucleic acid scaffold modification
  source 1..16: mol_type = other RNA
agcttctgttagccac

SEQ ID NO: 1673 - RNA, 16 nt, synthetic construct
  misc_feature 1..16: note = Antisense oligonucleotide
  modified_base 1: mod_base = OTHER; note = misc_feature - bicyclic nucleic acid scaffold modification
  modified_base 6: mod_base = OTHER; note = misc_feature - bicyclic nucleic acid scaffold modification
  modified_base 12: mod_base = OTHER; note = misc_feature - bicyclic nucleic acid scaffold modification
  modified_base 16: mod_base = OTHER; note = misc_feature - bicyclic nucleic acid scaffold modification
  source 1..16: mol_type = other RNA
agcttctgttagccac

SEQ ID NO: 1674 - RNA, 16 nt, synthetic construct
  misc_feature 1..16: note = Antisense oligonucleotide
  modified_base 1: mod_base = OTHER; note = misc_feature - bicyclic nucleic acid scaffold modification
  modified_base 8: mod_base = OTHER; note = misc_feature - bicyclic nucleic acid scaffold modification
  modified_base 12: mod_base = OTHER; note = misc_feature - bicyclic nucleic acid scaffold modification
  modified_base 16: mod_base = OTHER; note = misc_feature - bicyclic nucleic acid scaffold modification
  source 1..16: mol_type = other RNA
agcttctgttagccac

SEQ ID NO: 1675 - RNA, 16 nt, synthetic construct
  misc_feature 1..16: note = Antisense oligonucleotide
  modified_base 1: mod_base = OTHER; note = misc_feature - bicyclic nucleic acid scaffold modification
  modified_base 6: mod_base = OTHER; note = misc_feature - bicyclic nucleic acid scaffold modification
  modified_base 8: mod_base = OTHER; note = misc_feature - bicyclic nucleic acid scaffold modification
  modified_base 12: mod_base = OTHER; note = misc_feature - bicyclic nucleic acid scaffold modification
  modified_base 16: mod_base = OTHER; note = misc_feature - bicyclic nucleic acid scaffold modification
  source 1..16: mol_type = other RNA
agcttctgttagccac

SEQ ID NO: 1676 - RNA, 16 nt, synthetic construct
  modified_base 16: mod_base = OTHER; note = thymine
  misc_feature 1..16: note = Antisense oligonucleotide
  modified_base 1: mod_base = OTHER; note = misc_feature - bicyclic nucleic acid scaffold modification
  modified_base 16: mod_base = OTHER; note = misc_feature - bicyclic nucleic acid scaffold modification
  source 1..16: mol_type = other RNA
gcttctgttagccact

SEQ ID NO: 1677 - RNA, 16 nt, synthetic construct
  modified_base 16: mod_base = OTHER; note = thymine
  misc_feature 1..16: note = Antisense oligonucleotide
  modified_base 1: mod_base = OTHER; note = misc_feature - bicyclic nucleic acid scaffold modification
  modified_base 5: mod_base = OTHER; note = misc_feature - bicyclic nucleic acid scaffold modification
  modified_base 16: mod_base = OTHER; note = misc_feature - bicyclic nucleic acid scaffold modification
  source 1..16: mol_type = other RNA
gcttctgttagccact

SEQ ID NO: 1678 - RNA, 16 nt, synthetic construct
  modified_base 16: mod_base = OTHER; note = thymine
  misc_feature 1..16: note = Antisense oligonucleotide
  modified_base 1: mod_base = OTHER; note = misc_feature - bicyclic nucleic acid scaffold modification
  modified_base 7: mod_base = OTHER; note = misc_feature - bicyclic nucleic acid scaffold modification
  modified_base 16: mod_base = OTHER; note = misc_feature - bicyclic nucleic acid scaffold modification
  source 1..16: mol_type = other RNA
gcttctgttagccact

SEQ ID NO: 1679 - RNA, 16 nt, synthetic construct
  modified_base 16: mod_base = OTHER; note = thymine
  misc_feature 1..16: note = Antisense oligonucleotide
  modified_base 1: mod_base = OTHER; note = misc_feature - bicyclic nucleic acid scaffold modification
  modified_base 11: mod_base = OTHER; note = misc_feature - bicyclic nucleic acid scaffold modification
  modified_base 16: mod_base = OTHER; note = misc_feature - bicyclic nucleic acid scaffold modification
  source 1..16: mol_type = other RNA
gcttctgttagccact

SEQ ID NO: 1680 - RNA, 16 nt, synthetic construct
  modified_base 16: mod_base = OTHER; note = thymine
  misc_feature 1..16: note = Antisense oligonucleotide
  modified_base 1: mod_base = OTHER; note = misc_feature - bicyclic nucleic acid scaffold modification
  modified_base 13: mod_base = OTHER; note = misc_feature - bicyclic nucleic acid scaffold modification
  modified_base 16: mod_base = OTHER; note = misc_feature - bicyclic nucleic acid scaffold modification
  source 1..16: mol_type = other RNA
gcttctgttagccact

SEQ ID NO: 1681 - RNA, 16 nt, synthetic construct
  modified_base 16: mod_base = OTHER; note = thymine
  misc_feature 1..16: note = Antisense oligonucleotide
  modified_base 1: mod_base = OTHER; note = misc_feature - bicyclic nucleic acid scaffold modification
  modified_base 15..16: mod_base = OTHER; note = misc_feature - bicyclic nucleic acid scaffold modification
  source 1..16: mol_type = other RNA
gcttctgttagccact

SEQ ID NO: 1682 - RNA, 16 nt, synthetic construct
  modified_base 16: mod_base = OTHER; note = thymine
  misc_feature 1..16: note = Antisense oligonucleotide
  modified_base 1..2: mod_base = OTHER; note = misc_feature - bicyclic nucleic acid scaffold modification
  modified_base 16: mod_base = OTHER; note = misc_feature - bicyclic nucleic acid scaffold modification
  source 1..16: mol_type = other RNA
gcttctgttagccact

SEQ ID NO: 1683 - RNA, 16 nt, synthetic construct
  modified_base 16: mod_base = OTHER; note = thymine
  misc_feature 1..16: note = Antisense oligonucleotide
  modified_base 1: mod_base = OTHER; note = misc_feature - bicyclic nucleic acid scaffold modification
  modified_base 5: mod_base = OTHER; note = misc_feature - bicyclic nucleic acid scaffold modification
  modified_base 11: mod_base = OTHER; note = misc_feature - bicyclic nucleic acid scaffold modification
  modified_base 16: mod_base = OTHER; note = misc_feature - bicyclic nucleic acid scaffold modification
  source 1..16: mol_type = other RNA
gcttctgttagccact

SEQ ID NO: 1684 - RNA, 16 nt, synthetic construct
  modified_base 16: mod_base = OTHER; note = thymine
  misc_feature 1..16: note = Antisense oligonucleotide
  modified_base 1: mod_base = OTHER; note = misc_feature - bicyclic nucleic acid scaffold modification
  modified_base 7: mod_base = OTHER; note = misc_feature - bicyclic nucleic acid scaffold modification
  modified_base 11: mod_base = OTHER; note = misc_feature - bicyclic nucleic acid scaffold modification
  modified_base 16: mod_base = OTHER; note = misc_feature - bicyclic nucleic acid scaffold modification
  source 1..16: mol_type = other RNA
gcttctgttagccact

SEQ ID NO: 1685 - RNA, 16 nt, synthetic construct
  modified_base 16: mod_base = OTHER; note = thymine
  misc_feature 1..16: note = Antisense oligonucleotide
  modified_base 1..2: mod_base = OTHER; note = misc_feature - bicyclic nucleic acid scaffold modification
  modified_base 15..16: mod_base = OTHER; note = misc_feature - bicyclic nucleic acid scaffold modification
  source 1..16: mol_type = other RNA
gcttctgttagccact

SEQ ID NO: 1686 - RNA, 16 nt, synthetic construct
  modified_base 16: mod_base = OTHER; note = thymine
  misc_feature 1..16: note = Antisense oligonucleotide
  modified_base 1..2: mod_base = OTHER; note = misc_feature - bicyclic nucleic acid scaffold modification
  modified_base 7: mod_base = OTHER; note = misc_feature - bicyclic nucleic acid scaffold modification
  modified_base 15..16: mod_base = OTHER; note = misc_feature - bicyclic nucleic acid scaffold modification
  source 1..16: mol_type = other RNA
gcttctgttagccact

SEQ ID NO: 1687 - RNA, 16 nt, synthetic construct
  misc_feature 1..16: note = Antisense oligonucleotide
  modified_base 1: mod_base = OTHER; note = misc_feature - bicyclic nucleic acid scaffold modification
  modified_base 16: mod_base = OTHER; note = misc_feature - bicyclic nucleic acid scaffold modification
  source 1..16: mol_type = other RNA
cttctgttagccactg

SEQ ID NO: 1688 - RNA, 16 nt, synthetic construct
  misc_feature 1..16: note = Antisense oligonucleotide
  modified_base 1: mod_base = OTHER; note = misc_feature - bicyclic nucleic acid scaffold modification
  modified_base 4: mod_base = OTHER; note = misc_feature - bicyclic nucleic acid scaffold modification
  modified_base 16: mod_base = OTHER; note = misc_feature - bicyclic nucleic acid scaffold modification
  source 1..16: mol_type = other RNA
cttctgttagccactg

SEQ ID NO: 1689 - RNA, 16 nt, synthetic construct
  misc_feature 1..16: note = Antisense oligonucleotide
  modified_base 1: mod_base = OTHER; note = misc_feature - bicyclic nucleic acid scaffold modification
  modified_base 6: mod_base = OTHER; note = misc_feature - bicyclic nucleic acid scaffold modification
  modified_base 16: mod_base = OTHER; note = misc_feature - bicyclic nucleic acid scaffold modification
  source 1..16: mol_type = other RNA
cttctgttagccactg

SEQ ID NO: 1690 - RNA, 16 nt, synthetic construct
  misc_feature 1..16: note = Antisense oligonucleotide
  modified_base 1: mod_base = OTHER; note = misc_feature - bicyclic nucleic acid scaffold modification
  modified_base 10: mod_base = OTHER; note = misc_feature - bicyclic nucleic acid scaffold modification
  modified_base 16: mod_base = OTHER; note = misc_feature - bicyclic nucleic acid scaffold modification
  source 1..16: mol_type = other RNA
cttctgttagccactg

SEQ ID NO: 1691 - RNA, 16 nt, synthetic construct
  misc_feature 1..16: note = Antisense oligonucleotide
  modified_base 1: mod_base = OTHER; note = misc_feature - bicyclic nucleic acid scaffold modification
  modified_base 12: mod_base = OTHER; note = misc_feature - bicyclic nucleic acid scaffold modification
  modified_base 16: mod_base = OTHER; note = misc_feature - bicyclic nucleic acid scaffold modification
  source 1..16: mol_type = other RNA
cttctgttagccactg

SEQ ID NO: 1692 - RNA, 16 nt, synthetic construct
  misc_feature 1..16: note = Antisense oligonucleotide
  modified_base 1: mod_base = OTHER; note = misc_feature - bicyclic nucleic acid scaffold modification
  modified_base 14: mod_base = OTHER; note = misc_feature - bicyclic nucleic acid scaffold modification
  modified_base 16: mod_base = OTHER; note = misc_feature - bicyclic nucleic acid scaffold modification
  source 1..16: mol_type = other RNA
cttctgttagccactg

SEQ ID NO: 1693 - RNA, 16 nt, synthetic construct
  misc_feature 1..16: note = Antisense oligonucleotide
  modified_base 1: mod_base = OTHER; note = misc_feature - bicyclic nucleic acid scaffold modification
  modified_base 4: mod_base = OTHER; note = misc_feature - bicyclic nucleic acid scaffold modification
  modified_base 12: mod_base = OTHER; note = misc_feature - bicyclic nucleic acid scaffold modification
  modified_base 16: mod_base = OTHER; note = misc_feature - bicyclic nucleic acid scaffold modification
  source 1..16: mol_type = other RNA
cttctgttagccactg

SEQ ID NO: 1694 - RNA, 16 nt, synthetic construct
  misc_feature 1..16: note = Antisense oligonucleotide
  modified_base 1: mod_base = OTHER; note = misc_feature - bicyclic nucleic acid scaffold modification
  modified_base 6: mod_base = OTHER; note = misc_feature - bicyclic nucleic acid scaffold modification
  modified_base 10: mod_base = OTHER; note = misc_feature - bicyclic nucleic acid scaffold modification
  modified_base 16: mod_base = OTHER; note = misc_feature - bicyclic nucleic acid scaffold modification
  source 1..16: mol_type = other RNA
cttctgttagccactg

SEQ ID NO: 1695 - RNA, 16 nt, synthetic construct
  misc_feature 1..16: note = Antisense oligonucleotide
  modified_base 1: mod_base = OTHER; note = misc_feature - bicyclic nucleic acid scaffold modification
  modified_base 4: mod_base = OTHER; note = misc_feature - bicyclic nucleic acid scaffold modification
  modified_base 6: mod_base = OTHER; note = misc_feature - bicyclic nucleic acid scaffold modification
  modified_base 10: mod_base = OTHER; note = misc_feature - bicyclic nucleic acid scaffold modification
  modified_base 14: mod_base = OTHER; note = misc_feature - bicyclic nucleic acid scaffold modification
  modified_base 16: mod_base = OTHER; note = misc_feature - bicyclic nucleic acid scaffold modification
  source 1..16: mol_type = other RNA
cttctgttagccactg

SEQ ID NO: 1696 - RNA, 23 nt, synthetic construct
  misc_feature 1..23: note = Antisense oligonucleotide
  modified_base 1: mod_base = OTHER; note = misc_feature - bicyclic nucleic acid scaffold modification
  modified_base 7: mod_base = OTHER; note = misc_feature - bicyclic nucleic acid scaffold modification
  modified_base 23: mod_base = OTHER; note = misc_feature - bicyclic nucleic acid scaffold modification
  source 1..23: mol_type = other RNA
ccatttgtatttagcatgttccc

SEQ ID NO: 1697 - RNA, 23 nt, synthetic construct
  misc_feature 1..23: note = Antisense oligonucleotide
  modified_base 1: mod_base = OTHER; note = misc_feature - bicyclic nucleic acid scaffold modification
  modified_base 14: mod_base = OTHER; note = misc_feature - bicyclic nucleic acid scaffold modification
  modified_base 23: mod_base = OTHER; note = misc_feature - bicyclic nucleic acid scaffold modification
  source 1..23: mol_type = other RNA
ccatttgtatttagcatgttccc

SEQ ID NO: 1698 - RNA, 23 nt, synthetic construct
  misc_feature 1..23: note = Antisense oligonucleotide
  modified_base 1: mod_base = OTHER; note = misc_feature - bicyclic nucleic acid scaffold modification
  modified_base 18: mod_base = OTHER; note = misc_feature - bicyclic nucleic acid scaffold modification
  modified_base 23: mod_base = OTHER; note = misc_feature - bicyclic nucleic acid scaffold modification
  source 1..23: mol_type = other RNA
ccatttgtatttagcatgttccc

SEQ ID NO: 1699 - RNA, 23 nt, synthetic construct
  misc_feature 1..23: note = Antisense oligonucleotide
  modified_base 1: mod_base = OTHER; note = misc_feature - bicyclic nucleic acid scaffold modification
  modified_base 22..23: mod_base = OTHER; note = misc_feature - bicyclic nucleic acid scaffold modification
  source 1..23: mol_type = other RNA
ccatttgtatttagcatgttccc

SEQ ID NO: 1700 - RNA, 23 nt, synthetic construct
  misc_feature 1..23: note = Antisense oligonucleotide
  modified_base 1: mod_base = OTHER; note = misc_feature - bicyclic nucleic acid scaffold modification
  modified_base 7: mod_base = OTHER; note = misc_feature - bicyclic nucleic acid scaffold modification
  modified_base 14: mod_base = OTHER; note = misc_feature - bicyclic nucleic acid scaffold modification
  modified_base 23: mod_base = OTHER; note = misc_feature - bicyclic nucleic acid scaffold modification
  source 1..23: mol_type = other RNA
ccatttgtatttagcatgttccc

SEQ ID NO: 1701 - RNA, 23 nt, synthetic construct
  misc_feature 1..23: note = Antisense oligonucleotide
  modified_base 1..2: mod_base = OTHER; note = misc_feature - bicyclic nucleic acid scaffold modification
  modified_base 15: mod_base = OTHER; note = misc_feature - bicyclic nucleic acid scaffold modification
  modified_base 22..23: mod_base = OTHER; note = misc_feature - bicyclic nucleic acid scaffold modification
  source 1..23: mol_type = other RNA
ccatttgtatttagcatgttccc

SEQ ID NO: 1702 - RNA, 23 nt, synthetic construct
  misc_feature 1..23: note = Antisense oligonucleotide
  modified_base 1: mod_base = OTHER; note = misc_feature - bicyclic nucleic acid scaffold modification
  modified_base 7: mod_base = OTHER; note = misc_feature - bicyclic nucleic acid scaffold modification
  modified_base 14: mod_base = OTHER; note = misc_feature - bicyclic nucleic acid scaffold modification
  modified_base 18: mod_base = OTHER; note = misc_feature - bicyclic nucleic acid scaffold modification
  modified_base 23: mod_base = OTHER; note = misc_feature - bicyclic nucleic acid scaffold modification
  source 1..23: mol_type = other RNA
ccatttgtatttagcatgttccc

SEQ ID NO: 1703 - RNA, 20 nt, synthetic construct
  modified_base 20: mod_base = OTHER; note = thymine
  misc_feature 1..20: note = Antisense oligonucleotide
  modified_base 1: mod_base = OTHER; note = misc_feature - bicyclic nucleic acid scaffold modification
  modified_base 20: mod_base = OTHER; note = misc_feature - bicyclic nucleic acid scaffold modification
  source 1..20: mol_type = other RNA
ccatttgtatttagcatgtt

SEQ ID NO: 1704 - RNA, 20 nt, synthetic construct
  modified_base 20: mod_base = OTHER; note = thymine
  misc_feature 1..20: note = Antisense oligonucleotide
  modified_base 1: mod_base = OTHER; note = misc_feature - bicyclic nucleic acid scaffold modification
  modified_base 7: mod_base = OTHER; note = misc_feature - bicyclic nucleic acid scaffold modification
  modified_base 20: mod_base = OTHER; note = misc_feature - bicyclic nucleic acid scaffold modification
  source 1..20: mol_type = other RNA
ccatttgtatttagcatgtt

SEQ ID NO: 1705 - RNA, 20 nt, synthetic construct
  modified_base 20: mod_base = OTHER; note = thymine
  misc_feature 1..20: note = Antisense oligonucleotide
  modified_base 1: mod_base = OTHER; note = misc_feature - bicyclic nucleic acid scaffold modification
  modified_base 14: mod_base = OTHER; note = misc_feature - bicyclic nucleic acid scaffold modification
  modified_base 20: mod_base = OTHER; note = misc_feature - bicyclic nucleic acid scaffold modification
  source 1..20: mol_type = other RNA
ccatttgtatttagcatgtt

SEQ ID NO: 1706 - RNA, 20 nt, synthetic construct
  modified_base 20: mod_base = OTHER; note = thymine
  misc_feature 1..20: note = Antisense oligonucleotide
  modified_base 1: mod_base = OTHER; note = misc_feature - bicyclic nucleic acid scaffold modification
  modified_base 18: mod_base = OTHER; note = misc_feature - bicyclic nucleic acid scaffold modification
  modified_base 20: mod_base = OTHER; note = misc_feature - bicyclic nucleic acid scaffold modification
  source 1..20: mol_type = other RNA
ccatttgtatttagcatgtt

SEQ ID NO: 1707 - RNA, 20 nt, synthetic construct
  modified_base 20: mod_base = OTHER; note = thymine
  misc_feature 1..20: note = Antisense oligonucleotide
  modified_base 1: mod_base = OTHER; note = misc_feature - bicyclic nucleic acid scaffold modification
  modified_base 7: mod_base = OTHER; note = misc_feature - bicyclic nucleic acid scaffold modification
  modified_base 14: mod_base = OTHER; note = misc_feature - bicyclic nucleic acid scaffold modification
  modified_base 20: mod_base = OTHER; note = misc_feature - bicyclic nucleic acid scaffold modification
  source 1..20: mol_type = other RNA
ccatttgtatttagcatgtt

SEQ ID NO: 1708 - RNA, 20 nt, synthetic construct
  modified_base 19..20: mod_base = OTHER; note = thymine
  misc_feature 1..20: note = Antisense oligonucleotide
  modified_base 1..2: mod_base = OTHER; note = misc_feature - bicyclic nucleic acid scaffold modification
  modified_base 19..20: mod_base = OTHER; note = misc_feature - bicyclic nucleic acid scaffold modification
  source 1..20: mol_type = other RNA
ccatttgtatttagcatgtt

SEQ ID NO: 1709 - RNA, 20 nt, synthetic construct
  modified_base 20: mod_base = OTHER; note = thymine
  misc_feature 1..20: note = Antisense oligonucleotide
  modified_base 1: mod_base = OTHER; note = misc_feature - bicyclic nucleic acid scaffold modification
  modified_base 7: mod_base = OTHER; note = misc_feature - bicyclic nucleic acid scaffold modification
  modified_base 14: mod_base = OTHER; note = misc_feature - bicyclic nucleic acid scaffold modification
  modified_base 18: mod_base = OTHER; note = misc_feature - bicyclic nucleic acid scaffold modification
  modified_base 20: mod_base = OTHER; note = misc_feature - bicyclic nucleic acid scaffold modification
  source 1..20: mol_type = other RNA
ccatttgtatttagcatgtt

SEQ ID NO: 1710 - RNA, 20 nt, synthetic construct
  misc_feature 1..20: note = Antisense oligonucleotide
  modified_base 1: mod_base = OTHER; note = misc_feature - bicyclic nucleic acid scaffold modification
  modified_base 20: mod_base = OTHER; note = misc_feature - bicyclic nucleic acid scaffold modification
  source 1..20: mol_type = other RNA
catttgtatttagcatgttc

SEQ ID NO: 1711 - RNA, 20 nt, synthetic construct
  misc_feature 1..20: note = Antisense oligonucleotide
  modified_base 1: mod_base = OTHER; note = misc_feature - bicyclic nucleic acid scaffold modification
  modified_base 6: mod_base = OTHER; note = misc_feature - bicyclic nucleic acid scaffold modification
  modified_base 20: mod_base = OTHER; note = misc_feature - bicyclic nucleic acid scaffold modification
  source 1..20: mol_type = other RNA
catttgtatttagcatgttc

SEQ ID NO: 1712 - RNA, 20 nt, synthetic construct
  misc_feature 1..20: note = Antisense oligonucleotide
  modified_base 1: mod_base = OTHER; note = misc_feature - bicyclic nucleic acid scaffold modification
  modified_base 13: mod_base = OTHER; note = misc_feature - bicyclic nucleic acid scaffold modification
  modified_base 20: mod_base = OTHER; note = misc_feature - bicyclic nucleic acid scaffold modification
  source 1..20: mol_type = other RNA
catttgtatttagcatgttc

SEQ ID NO: 1713 - RNA, 20 nt, synthetic construct
  misc_feature 1..20: note = Antisense oligonucleotide
  modified_base 1: mod_base = OTHER; note = misc_feature - bicyclic nucleic acid scaffold modification
  modified_base 17: mod_base = OTHER; note = misc_feature - bicyclic nucleic acid scaffold modification
  modified_base 20: mod_base = OTHER; note = misc_feature - bicyclic nucleic acid scaffold modification
  source 1..20: mol_type = other RNA
catttgtatttagcatgttc

SEQ ID NO: 1714 - RNA, 20 nt, synthetic construct
  misc_feature 1..20: note = Antisense oligonucleotide
  modified_base 1: mod_base = OTHER; note = misc_feature - bicyclic nucleic acid scaffold modification
  modified_base 6: mod_base = OTHER; note = misc_feature - bicyclic nucleic acid scaffold modification
  modified_base 13: mod_base = OTHER; note = misc_feature - bicyclic nucleic acid scaffold modification
  modified_base 20: mod_base = OTHER; note = misc_feature - bicyclic nucleic acid scaffold modification
  source 1..20: mol_type = other RNA
catttgtatttagcatgttc

SEQ ID NO: 1715 - RNA, 20 nt, synthetic construct
  misc_feature 1..20: note = Antisense oligonucleotide
  modified_base 1: mod_base = OTHER; note = misc_feature - bicyclic nucleic acid scaffold modification
  modified_base 6: mod_base = OTHER; note = misc_feature - bicyclic nucleic acid scaffold modification
  modified_base 13: mod_base = OTHER; note = misc_feature - bicyclic nucleic acid scaffold modification
  modified_base 17: mod_base = OTHER; note = misc_feature - bicyclic nucleic acid scaffold modification
  modified_base 20: mod_base = OTHER; note = misc_feature - bicyclic nucleic acid scaffold modification
  source 1..20: mol_type = other RNA
catttgtatttagcatgttc

SEQ ID NO: 1716 - RNA, 20 nt, synthetic construct
  modified_base 19: mod_base = OTHER; note = thymine
  misc_feature 1..20: note = Antisense oligonucleotide
  modified_base 1..2: mod_base = OTHER; note = misc_feature - bicyclic nucleic acid scaffold modification
  modified_base 6: mod_base = OTHER; note = misc_feature - bicyclic nucleic acid scaffold modification
  modified_base 13: mod_base = OTHER; note = misc_feature - bicyclic nucleic acid scaffold modification
  modified_base 19..20: mod_base = OTHER; note = misc_feature - bicyclic nucleic acid scaffold modification
  source 1..20: mol_type = other RNA
catttgtatttagcatgttc

SEQ ID NO: 1717 - RNA, 20 nt, synthetic construct
  misc_feature 1..20: note = Antisense oligonucleotide
  modified_base 1: mod_base = OTHER; note = misc_feature - bicyclic nucleic acid scaffold modification
  modified_base 20: mod_base = OTHER; note = misc_feature - bicyclic nucleic acid scaffold modification
  source 1..20: mol_type = other RNA
atttgtatttagcatgttcc

SEQ ID NO: 1718 - RNA, 20 nt, synthetic construct
  misc_feature 1..20: note = Antisense oligonucleotide
  modified_base 1: mod_base = OTHER; note = misc_feature - bicyclic nucleic acid scaffold modification
  modified_base 5: mod_base = OTHER; note = misc_feature - bicyclic nucleic acid scaffold modification
  modified_base 20: mod_base = OTHER; note = misc_feature - bicyclic nucleic acid scaffold modification
  source 1..20: mol_type = other RNA
atttgtatttagcatgttcc

SEQ ID NO: 1719 - RNA, 20 nt, synthetic construct
  misc_feature 1..20: note = Antisense oligonucleotide
  modified_base 1: mod_base = OTHER; note = misc_feature - bicyclic nucleic acid scaffold modification
  modified_base 12: mod_base = OTHER; note = misc_feature - bicyclic nucleic acid scaffold modification
  modified_base 20: mod_base = OTHER; note = misc_feature - bicyclic nucleic acid scaffold modification
  source 1..20: mol_type = other RNA
atttgtatttagcatgttcc

SEQ ID NO: 1720 - RNA, 20 nt, synthetic construct
  misc_feature 1..20: note = Antisense oligonucleotide
  modified_base 1: mod_base = OTHER; note = misc_feature - bicyclic nucleic acid scaffold modification
  modified_base 16: mod_base = OTHER; note = misc_feature - bicyclic nucleic acid scaffold modification
  modified_base 20: mod_base = OTHER; note = misc_feature - bicyclic nucleic acid scaffold modification
  source 1..20: mol_type = other RNA
atttgtatttagcatgttcc

SEQ ID NO: 1721 - RNA, 20 nt, synthetic construct
  misc_feature 1..20: note = Antisense oligonucleotide
  modified_base 1: mod_base = OTHER; note = misc_feature - bicyclic nucleic acid scaffold modification
  modified_base 5: mod_base = OTHER; note = misc_feature - bicyclic nucleic acid scaffold modification
  modified_base 12: mod_base = OTHER; note = misc_feature - bicyclic nucleic acid scaffold modification
  modified_base 20: mod_base = OTHER; note = misc_feature - bicyclic nucleic acid scaffold modification
  source 1..20: mol_type = other RNA
atttgtatttagcatgttcc

SEQ ID NO: 1722 - RNA, 20 nt, synthetic construct
  misc_feature 1..20: note = Antisense oligonucleotide
  modified_base 1: mod_base = OTHER; note = misc_feature - bicyclic nucleic acid scaffold modification
  modified_base 5: mod_base = OTHER; note = misc_feature - bicyclic nucleic acid scaffold modification
  modified_base 16: mod_base = OTHER; note = misc_feature - bicyclic nucleic acid scaffold modification
  modified_base 20: mod_base = OTHER; note = misc_feature - bicyclic nucleic acid scaffold modification
  source 1..20: mol_type = other RNA
atttgtatttagcatgttcc

SEQ ID NO: 1723 - RNA, 20 nt, synthetic construct
  modified_base 2: mod_base = OTHER; note = thymine
  misc_feature 1..20: note = Antisense oligonucleotide
  modified_base 1..2: mod_base = OTHER; note = misc_feature - bicyclic nucleic acid scaffold modification
  modified_base 13: mod_base = OTHER; note = misc_feature - bicyclic nucleic acid scaffold modification
  modified_base 19..20: mod_base = OTHER; note = misc_feature - bicyclic nucleic acid scaffold modification
  source 1..20: mol_type = other RNA
atttgtatttagcatgttcc

SEQ ID NO: 1724 - RNA, 20 nt, synthetic construct
  modified_base 1: mod_base = OTHER; note = thymine
  misc_feature 1..20: note = Antisense oligonucleotide
  modified_base 1: mod_base = OTHER; note = misc_feature - bicyclic nucleic acid scaffold modification
  modified_base 20: mod_base = OTHER; note = misc_feature - bicyclic nucleic acid scaffold modification
  source 1..20: mol_type = other RNA
tttgtatttagcatgttccc

SEQ ID NO: 1725 - RNA, 20 nt, synthetic construct
  modified_base 1: mod_base = OTHER; note = thymine
  misc_feature 1..20: note = Antisense oligonucleotide
  modified_base 1: mod_base = OTHER; note = misc_feature - bicyclic nucleic acid scaffold modification
  modified_base 4: mod_base = OTHER; note = misc_feature - bicyclic nucleic acid scaffold modification
  modified_base 20: mod_base = OTHER; note = misc_feature - bicyclic nucleic acid scaffold modification
  source 1..20: mol_type = other RNA
tttgtatttagcatgttccc

SEQ ID NO: 1726 - RNA, 20 nt, synthetic construct
  modified_base 1: mod_base = OTHER; note = thymine
  misc_feature 1..20: note = Antisense oligonucleotide
  modified_base 1: mod_base = OTHER; note = misc_feature - bicyclic nucleic acid scaffold modification
  modified_base 11: mod_base = OTHER; note = misc_feature - bicyclic nucleic acid scaffold modification
  modified_base 20: mod_base = OTHER; note = misc_feature - bicyclic nucleic acid scaffold modification
  source 1..20: mol_type = other RNA
tttgtatttagcatgttccc

SEQ ID NO: 1727 - RNA, 20 nt, synthetic construct
  modified_base 1: mod_base = OTHER; note = thymine
  misc_feature 1..20: note = Antisense oligonucleotide
  modified_base 1: mod_base = OTHER; note = misc_feature - bicyclic nucleic acid scaffold modification
  modified_base 15: mod_base = OTHER; note = misc_feature - bicyclic nucleic acid scaffold modification
  modified_base 20: mod_base = OTHER; note = misc_feature - bicyclic nucleic acid scaffold modification
  source 1..20: mol_type = other RNA
tttgtatttagcatgttccc

SEQ ID NO: 1728 - RNA, 20 nt, synthetic construct
  modified_base 1: mod_base = OTHER; note = thymine
  misc_feature 1..20: note = Antisense oligonucleotide
  modified_base 1: mod_base = OTHER; note = misc_feature - bicyclic nucleic acid scaffold modification
  modified_base 4: mod_base = OTHER; note = misc_feature - bicyclic nucleic acid scaffold modification
  modified_base 15: mod_base = OTHER; note = misc_feature - bicyclic nucleic acid scaffold modification
  modified_base 20: mod_base = OTHER; note = misc_feature - bicyclic nucleic acid scaffold modification
  source 1..20: mol_type = other RNA
tttgtatttagcatgttccc

SEQ ID NO: 1729 - RNA, 20 nt, synthetic construct
  modified_base 1: mod_base = OTHER; note = thymine
  misc_feature 1..20: note = Antisense oligonucleotide
  modified_base 1: mod_base = OTHER; note = misc_feature - bicyclic nucleic acid scaffold modification
  modified_base 4: mod_base = OTHER; note = misc_feature - bicyclic nucleic acid scaffold modification
  modified_base 11: mod_base = OTHER; note = misc_feature - bicyclic nucleic acid scaffold modification
  modified_base 20: mod_base = OTHER; note = misc_feature - bicyclic nucleic acid scaffold modification
  source 1..20: mol_type = other RNA
tttgtatttagcatgttccc

SEQ ID NO: 1730 - RNA, 20 nt, synthetic construct
  modified_base 1: mod_base = OTHER; note = thymine
  misc_feature 1..20: note = Antisense oligonucleotide
  modified_base 1: mod_base = OTHER; note = misc_feature - bicyclic nucleic acid scaffold modification
  modified_base 4: mod_base = OTHER; note = misc_feature - bicyclic nucleic acid scaffold modification
  modified_base 11: mod_base = OTHER; note = misc_feature - bicyclic nucleic acid scaffold modification
  modified_base 15: mod_base = OTHER; note = misc_feature - bicyclic nucleic acid scaffold modification
  modified_base 20: mod_base = OTHER; note = misc_feature - bicyclic nucleic acid scaffold modification
  source 1..20: mol_type = other RNA
tttgtatttagcatgttccc

SEQ ID NO: 1731 - RNA, 20 nt, synthetic construct
  modified_base 1..2: mod_base = OTHER; note = thymine
  misc_feature 1..20: note = Antisense oligonucleotide
  modified_base 1..2: mod_base = OTHER; note = misc_feature - bicyclic nucleic acid scaffold modification
  modified_base 11: mod_base = OTHER; note = misc_feature - bicyclic nucleic acid scaffold modification
  modified_base 19..20: mod_base = OTHER; note = misc_feature - bicyclic nucleic acid scaffold modification
  source 1..20: mol_type = other RNA
tttgtatttagcatgttccc

SEQ ID NO: 1732 - RNA, 18 nt, synthetic construct
  misc_feature 1..18: note = Antisense oligonucleotide
  modified_base 1: mod_base = OTHER; note = misc_feature - bicyclic nucleic acid scaffold modification
  modified_base 18: mod_base = OTHER; note = misc_feature - bicyclic nucleic acid scaffold modification
  source 1..18: mol_type = other RNA
ccatttgtatttagcatg

SEQ ID NO: 1733 - RNA, 18 nt, synthetic construct
  misc_feature 1..18: note = Antisense oligonucleotide
  modified_base 1: mod_base = OTHER; note = misc_feature - bicyclic nucleic acid scaffold modification
  modified_base 7: mod_base = OTHER; note = misc_feature - bicyclic nucleic acid scaffold modification
  modified_base 18: mod_base = OTHER; note = misc_feature - bicyclic nucleic acid scaffold modification
  source 1..18: mol_type = other RNA
ccatttgtatttagcatg

SEQ ID NO: 1734 - RNA, 18 nt, synthetic construct
  misc_feature 1..18: note = Antisense oligonucleotide
  modified_base 1: mod_base = OTHER; note = misc_feature - bicyclic nucleic acid scaffold modification
  modified_base 14: mod_base = OTHER; note = misc_feature - bicyclic nucleic acid scaffold modification
  modified_base 18: mod_base = OTHER; note = misc_feature - bicyclic nucleic acid scaffold modification
  source 1..18: mol_type = other RNA
ccatttgtatttagcatg

SEQ ID NO: 1735 - RNA, 18 nt, synthetic construct
  misc_feature 1..18: note = Antisense oligonucleotide
  modified_base 1: mod_base = OTHER; note = misc_feature - bicyclic nucleic acid scaffold modification
  modified_base 7: mod_base = OTHER; note = misc_feature - bicyclic nucleic acid scaffold modification
  modified_base 14: mod_base = OTHER; note = misc_feature - bicyclic nucleic acid scaffold modification
  modified_base 18: mod_base = OTHER; note = misc_feature - bicyclic nucleic acid scaffold modification
  source 1..18: mol_type = other RNA
ccatttgtatttagcatg

SEQ ID NO: 1736 - RNA, 18 nt, synthetic construct
  misc_feature 1..18: note = Antisense oligonucleotide
  modified_base 1..2: mod_base = OTHER; note = misc_feature - bicyclic nucleic acid scaffold modification
  modified_base 14..15: mod_base = OTHER; note = misc_feature - bicyclic nucleic acid scaffold modification
  modified_base 18: mod_base = OTHER; note = misc_feature - bicyclic nucleic acid scaffold modification
  source 1..18: mol_type = other RNA
ccatttgtatttagcatg

SEQ ID NO: 1737 - RNA, 18 nt, synthetic construct
  modified_base 17: mod_base = OTHER; note = thymine
  misc_feature 1..18: note = Antisense oligonucleotide
  modified_base 1..2: mod_base = OTHER; note = misc_feature - bicyclic nucleic acid scaffold modification
  modified_base 17..18: mod_base = OTHER; note = misc_feature - bicyclic nucleic acid scaffold modification
  source 1..18: mol_type = other RNA
ccatttgtatttagcatg

SEQ ID NO: 1738 - RNA, 18 nt, synthetic construct
  misc_feature 1..18: note = Antisense oligonucleotide
  modified_base 1: mod_base = OTHER; note = misc_feature - bicyclic nucleic acid scaffold modification
  modified_base 7: mod_base = OTHER; note = misc_feature - bicyclic nucleic acid scaffold modification
  modified_base 14..15: mod_base = OTHER; note = misc_feature - bicyclic nucleic acid scaffold modification
  modified_base 18: mod_base = OTHER; note = misc_feature - bicyclic nucleic acid scaffold modification
  source 1..18: mol_type = other RNA
ccatttgtatttagcatg

SEQ ID NO: 1739 - RNA, 18 nt, synthetic construct
  modified_base 18: mod_base = OTHER; note = thymine
  misc_feature 1..18: note = Antisense oligonucleotide
  modified_base 1: mod_base = OTHER; note = misc_feature - bicyclic nucleic acid scaffold modification
  modified_base 18: mod_base = OTHER; note = misc_feature - bicyclic nucleic acid scaffold modification
  source 1..18: mol_type = other RNA
catttgtatttagcatgt

SEQ ID NO: 1740 - RNA, 18 nt, synthetic construct
  modified_base 18: mod_base = OTHER; note = thymine
  misc_feature 1..18: note = Antisense oligonucleotide
  modified_base 1: mod_base = OTHER; note = misc_feature - bicyclic nucleic acid scaffold modification
  modified_base 6: mod_base = OTHER; note = misc_feature - bicyclic nucleic acid scaffold modification
  modified_base 18: mod_base = OTHER; note = misc_feature - bicyclic nucleic acid scaffold modification
  source 1..18: mol_type = other RNA
catttgtatttagcatgt

SEQ ID NO: 1741 - RNA, 18 nt, synthetic construct
  modified_base 18: mod_base = OTHER; note = thymine
  misc_feature 1..18: note = Antisense oligonucleotide
  modified_base 1: mod_base = OTHER; note = misc_feature - bicyclic nucleic acid scaffold modification
  modified_base 13: mod_base = OTHER; note = misc_feature - bicyclic nucleic acid scaffold modification
  modified_base 18: mod_base = OTHER; note = misc_feature - bicyclic nucleic acid scaffold modification
  source 1..18: mol_type = other RNA
catttgtatttagcatgt

SEQ ID NO: 1742 - RNA, 18 nt, synthetic construct
  modified_base 18: mod_base = OTHER; note = thymine
  misc_feature 1..18: note = Antisense oligonucleotide
  modified_base 1: mod_base = OTHER; note = misc_feature - bicyclic nucleic acid scaffold modification
  modified_base 6: mod_base = OTHER; note = misc_feature - bicyclic nucleic acid scaffold modification
  modified_base 13: mod_base = OTHER; note = misc_feature - bicyclic nucleic acid scaffold modification
  modified_base 18: mod_base = OTHER; note = misc_feature - bicyclic nucleic acid scaffold modification
  source 1..18: mol_type = other RNA
catttgtatttagcatgt

SEQ ID NO: 1743 - RNA, 18 nt, synthetic construct
  modified_base 18: mod_base = OTHER; note = thymine
  misc_feature 1..18: note = Antisense oligonucleotide
  modified_base 1: mod_base = OTHER; note = misc_feature - bicyclic nucleic acid scaffold modification
  modified_base 13..14: mod_base = OTHER; note = misc_feature - bicyclic nucleic acid scaffold modification
  modified_base 18: mod_base = OTHER; note = misc_feature - bicyclic nucleic acid scaffold modification
  source 1..18: mol_type = other RNA
catttgtatttagcatgt

SEQ ID NO: 1744 - RNA, 18 nt, synthetic construct
  modified_base 18: mod_base = OTHER; note = thymine
  misc_feature 1..18: note = Antisense oligonucleotide
  modified_base 1..2: mod_base = OTHER; note = misc_feature - bicyclic nucleic acid scaffold modification
  modified_base 17..18: mod_base = OTHER; note = misc_feature - bicyclic nucleic acid scaffold modification
  source 1..18: mol_type = other RNA
catttgtatttagcatgt

SEQ ID NO: 1745 - RNA, 18 nt, synthetic construct
  modified_base 18: mod_base = OTHER; note = thymine
  misc_feature 1..18: note = Antisense oligonucleotide
  modified_base 1: mod_base = OTHER; note = misc_feature - bicyclic nucleic acid scaffold modification
  modified_base 6: mod_base = OTHER; note = misc_feature - bicyclic nucleic acid scaffold modification
  modified_base 13..14: mod_base = OTHER; note = misc_feature - bicyclic nucleic acid scaffold modification
  modified_base 18: mod_base = OTHER; note = misc_feature - bicyclic nucleic acid scaffold modification
  source 1..18: mol_type = other RNA
catttgtatttagcatgt

SEQ ID NO: 1746 - RNA, 18 nt, synthetic construct
  modified_base 18: mod_base = OTHER; note = thymine
  misc_feature 1..18: note = Antisense oligonucleotide
  modified_base 1: mod_base = OTHER; note = misc_feature - bicyclic nucleic acid scaffold modification
  modified_base 18: mod_base = OTHER; note = misc_feature - bicyclic nucleic acid scaffold modification
  source 1..18: mol_type = other RNA
atttgtatttagcatgtt

SEQ ID NO: 1747 - RNA, 18 nt, synthetic construct
  modified_base 18: mod_base = OTHER; note = thymine
  misc_feature 1..18: note = Antisense oligonucleotide
  modified_base 1: mod_base = OTHER; note = misc_feature - bicyclic nucleic acid scaffold modification
  modified_base 18: mod_base = OTHER; note = misc_feature - bicyclic nucleic acid scaffold modification
  source 1..18: mol_type = other RNA
atttgtatttagcatgtt

SEQ ID NO: 1748 - RNA, 18 nt, synthetic construct
  modified_base 18: mod_base = OTHER; note = thymine
  misc_feature 1..18: note = Antisense oligonucleotide
  modified_base 1: mod_base = OTHER; note = misc_feature - bicyclic nucleic acid scaffold modification
  modified_base 5: mod_base = OTHER; note = misc_feature - bicyclic nucleic acid scaffold modification
  modified_base 18: mod_base = OTHER; note = misc_feature - bicyclic nucleic acid scaffold modification
  source 1..18: mol_type = other RNA
atttgtatttagcatgtt

SEQ ID NO: 1749 - RNA, 18 nt, synthetic construct
  modified_base 18: mod_base = OTHER; note = thymine
  misc_feature 1..18: note = Antisense oligonucleotide
  modified_base 1: mod_base = OTHER; note = misc_feature - bicyclic nucleic acid scaffold modification
  modified_base 12: mod_base = OTHER; note = misc_feature - bicyclic nucleic acid scaffold modification
  modified_base 18: mod_base = OTHER; note = misc_feature - bicyclic nucleic acid scaffold modification
  source 1..18: mol_type = other RNA
atttgtatttagcatgtt

SEQ ID NO: 1750 - RNA, 18 nt, synthetic construct
  modified_base 18: mod_base = OTHER; note = thymine
  misc_feature 1..18: note = Antisense oligonucleotide
  modified_base 1: mod_base = OTHER; note = misc_feature - bicyclic nucleic acid scaffold modification
  modified_base 5: mod_base = OTHER; note = misc_feature - bicyclic nucleic acid scaffold modification
  modified_base 12: mod_base = OTHER; note = misc_feature - bicyclic nucleic acid scaffold modification
  modified_base 18: mod_base = OTHER; note = misc_feature - bicyclic nucleic acid scaffold modification
  source 1..18: mol_type = other RNA
atttgtatttagcatgtt

SEQ ID NO: 1751 - RNA, 18 nt, synthetic construct
  modified_base 2: mod_base = OTHER; note = thymine
  modified_base 17..18: mod_base = OTHER; note = thymine
  misc_feature 1..18: note = Antisense oligonucleotide
  modified_base 1..2: mod_base = OTHER; note = misc_feature - bicyclic nucleic acid scaffold modification
  modified_base 17..18: mod_base = OTHER; note = misc_feature - bicyclic nucleic acid scaffold modification
  source 1..18: mol_type = other RNA
atttgtatttagcatgtt

SEQ ID NO: 1752 - RNA, 18 nt, synthetic construct
  modified_base 18: mod_base = OTHER; note = thymine
  misc_feature 1..18: note = Antisense oligonucleotide
  modified_base 1: mod_base = OTHER; note = misc_feature - bicyclic nucleic acid scaffold modification
  modified_base 5: mod_base = OTHER; note = misc_feature - bicyclic nucleic acid scaffold modification
  modified_base 12..13: mod_base = OTHER; note = misc_feature - bicyclic nucleic acid scaffold modification
  modified_base 18: mod_base = OTHER; note = misc_feature - bicyclic nucleic acid scaffold modification
  source 1..18: mol_type = other RNA
atttgtatttagcatgtt

SEQ ID NO: 1753 - RNA, 18 nt, synthetic construct
  modified_base 1: mod_base = OTHER; note = thymine
  misc_feature 1..18: note = Antisense oligonucleotide
  modified_base 1: mod_base = OTHER; note = misc_feature - bicyclic nucleic acid scaffold modification
  modified_base 18: mod_base = OTHER; note = misc_feature - bicyclic nucleic acid scaffold modification
  source 1..18: mol_type = other RNA
tttgtatttagcatgttc

SEQ ID NO: 1754 - RNA, 18 nt, synthetic construct
  modified_base 1: mod_base = OTHER; note = thymine
  misc_feature 1..18: note = Antisense oligonucleotide
  modified_base 1: mod_base = OTHER; note = misc_feature - bicyclic nucleic acid scaffold modification
  modified_base 4: mod_base = OTHER; note = misc_feature - bicyclic nucleic acid scaffold modification
  modified_base 18: mod_base = OTHER; note = misc_feature - bicyclic nucleic acid scaffold modification
  source 1..18: mol_type = other RNA
tttgtatttagcatgttc

SEQ ID NO: 1755 - RNA, 18 nt, synthetic construct
  modified_base 1: mod_base = OTHER; note = thymine
  misc_feature 1..18: note = Antisense oligonucleotide
  modified_base 1: mod_base = OTHER; note = misc_feature - bicyclic nucleic acid scaffold modification
  modified_base 11: mod_base = OTHER; note = misc_feature - bicyclic nucleic acid scaffold modification
  modified_base 18: mod_base = OTHER; note = misc_feature - bicyclic nucleic acid scaffold modification
  source 1..18: mol_type = other RNA
tttgtatttagcatgttc

SEQ ID NO: 1756 - RNA, 18 nt, synthetic construct
  modified_base 1: mod_base = OTHER; note = thymine
  misc_feature 1..18: note = Antisense oligonucleotide
  modified_base 1: mod_base = OTHER; note = misc_feature - bicyclic nucleic acid scaffold modification
  modified_base 15: mod_base = OTHER; note = misc_feature - bicyclic nucleic acid scaffold modification
  modified_base 18: mod_base = OTHER; note = misc_feature - bicyclic nucleic acid scaffold modification
  source 1..18: mol_type = other RNA
tttgtatttagcatgttc

SEQ ID NO: 1757 - RNA, 18 nt, synthetic construct
  modified_base 1: mod_base = OTHER; note = thymine
  misc_feature 1..18: note = Antisense oligonucleotide
  modified_base 1: mod_base = OTHER; note = misc_feature - bicyclic nucleic acid scaffold modification
  modified_base 4: mod_base = OTHER; note = misc_feature - bicyclic nucleic acid scaffold modification
  modified_base 11: mod_base = OTHER; note = misc_feature - bicyclic nucleic acid scaffold modification
  modified_base 18: mod_base = OTHER; note = misc_feature - bicyclic nucleic acid scaffold modification
  source 1..18: mol_type = other RNA
tttgtatttagcatgttc

SEQ ID NO: 1758 - RNA, 18 nt, synthetic construct
  modified_base 1: mod_base = OTHER; note = thymine
  misc_feature 1..18: note = Antisense oligonucleotide
  modified_base 1: mod_base = OTHER; note = misc_feature - bicyclic nucleic acid scaffold modification
  modified_base 4: mod_base = OTHER; note = misc_feature - bicyclic nucleic acid scaffold modification
  modified_base 11: mod_base = OTHER; note = misc_feature - bicyclic nucleic acid scaffold modification
  modified_base 15: mod_base = OTHER; note = misc_feature - bicyclic nucleic acid scaffold modification
  modified_base 18: mod_base = OTHER; note = misc_feature - bicyclic nucleic acid scaffold modification
  source 1..18: mol_type = other RNA
tttgtatttagcatgttc

SEQ ID NO: 1759 - RNA, 18 nt, synthetic construct
  modified_base 1: mod_base = OTHER; note = thymine
  misc_feature 1..18: note = Antisense oligonucleotide
  modified_base 1: mod_base = OTHER; note = misc_feature - bicyclic nucleic acid scaffold modification
  modified_base 4: mod_base = OTHER; note = misc_feature - bicyclic nucleic acid scaffold modification
  modified_base 11..12: mod_base = OTHER; note = misc_feature - bicyclic nucleic acid scaffold modification
  modified_base 15: mod_base = OTHER; note = misc_feature - bicyclic nucleic acid scaffold modification
  modified_base 18: mod_base = OTHER; note = misc_feature - bicyclic nucleic acid scaffold modification
  source 1..18: mol_type = other RNA
tttgtatttagcatgttc

SEQ ID NO: 1760 - RNA, 18 nt, synthetic construct
  modified_base 1: mod_base = OTHER; note = thymine
  misc_feature 1..18: note = Antisense oligonucleotide
  modified_base 1: mod_base = OTHER; note = misc_feature - bicyclic nucleic acid scaffold modification
  modified_base 18: mod_base = OTHER; note = misc_feature - bicyclic nucleic acid scaffold modification
  source 1..18: mol_type = other RNA
ttgtatttagcatgttcc

SEQ ID NO: 1761 - RNA, 18 nt, synthetic construct
  modified_base 1: mod_base = OTHER; note = thymine
  misc_feature 1..18: note = Antisense oligonucleotide
  modified_base 1: mod_base = OTHER; note = misc_feature - bicyclic nucleic acid scaffold modification
  modified_base 3: mod_base = OTHER; note = misc_feature - bicyclic nucleic acid scaffold modification
  modified_base 18: mod_base = OTHER; note = misc_feature - bicyclic nucleic acid scaffold modification
  source 1..18: mol_type = other RNA
ttgtatttagcatgttcc

SEQ ID NO: 1762 - RNA, 18 nt, synthetic construct
  modified_base 1: mod_base = OTHER; note = thymine
  misc_feature 1..18: note = Antisense oligonucleotide
  modified_base 1: mod_base = OTHER; note = misc_feature - bicyclic nucleic acid scaffold modification
  modified_base 10: mod_base = OTHER; note = misc_feature - bicyclic nucleic acid scaffold modification
  modified_base 18: mod_base = OTHER; note = misc_feature - bicyclic nucleic acid scaffold modification
  source 1..18: mol_type = other RNA
ttgtatttagcatgttcc

SEQ ID NO: 1763 - RNA, 18 nt, synthetic construct
  modified_base 1: mod_base = OTHER; note = thymine
  misc_feature 1..18: note = Antisense oligonucleotide
  modified_base 1: mod_base = OTHER; note = misc_feature - bicyclic nucleic acid scaffold modification
  modified_base 14: mod_base = OTHER; note = misc_feature - bicyclic nucleic acid scaffold modification
  modified_base 18: mod_base = OTHER; note = misc_feature - bicyclic nucleic acid scaffold modification
  source 1..18: mol_type = other RNA
ttgtatttagcatgttcc

SEQ ID NO: 1764 - RNA, 18 nt, synthetic construct
  modified_base 1: mod_base = OTHER; note = thymine
  misc_feature 1..18: note = Antisense oligonucleotide
  modified_base 1: mod_base = OTHER; note = misc_feature - bicyclic nucleic acid scaffold modification
  modified_base 3: mod_base = OTHER; note = misc_feature - bicyclic nucleic acid scaffold modification
  modified_base 10: mod_base = OTHER; note = misc_feature - bicyclic nucleic acid scaffold modification
  modified_base 18: mod_base = OTHER; note = misc_feature - bicyclic nucleic acid scaffold modification
  source 1..18: mol_type = other RNA
ttgtatttagcatgttcc

SEQ ID NO: 1765 - RNA, 18 nt, synthetic construct
  modified_base 1: mod_base = OTHER; note = thymine
  misc_feature 1..18: note = Antisense oligonucleotide
  modified_base 1: mod_base = OTHER; note = misc_feature - bicyclic nucleic acid scaffold modification
  modified_base 10: mod_base = OTHER; note = misc_feature - bicyclic nucleic acid scaffold modification
  modified_base 14: mod_base = OTHER; note = misc_feature - bicyclic nucleic acid scaffold modification
  modified_base 18: mod_base = OTHER; note = misc_feature - bicyclic nucleic acid scaffold modification
  source 1..18: mol_type = other RNA
ttgtatttagcatgttcc

SEQ ID NO: 1766 - RNA, 18 nt, synthetic construct
  modified_base 1: mod_base = OTHER; note = thymine
  misc_feature 1..18: note = Antisense oligonucleotide
  modified_base 1: mod_base = OTHER; note = misc_feature - bicyclic nucleic acid scaffold modification
  modified_base 3: mod_base = OTHER; note = misc_feature - bicyclic nucleic acid scaffold modification
  modified_base 10: mod_base = OTHER; note = misc_feature - bicyclic nucleic acid scaffold modification
  modified_base 14: mod_base = OTHER; note = misc_feature - bicyclic nucleic acid scaffold modification
  modified_base 18: mod_base = OTHER; note = misc_feature - bicyclic nucleic acid scaffold modification
  source 1..18: mol_type = other RNA
ttgtatttagcatgttcc

SEQ ID NO: 1767 - RNA, 18 nt, synthetic construct
  modified_base 1: mod_base = OTHER; note = thymine
  misc_feature 1..18: note = Antisense oligonucleotide
  modified_base 1: mod_base = OTHER; note = misc_feature - bicyclic nucleic acid scaffold modification
  modified_base 18: mod_base = OTHER; note = misc_feature - bicyclic nucleic acid scaffold modification
  source 1..18: mol_type = other RNA
tgtatttagcatgttccc

SEQ ID NO: 1768 - RNA, 18 nt, synthetic construct
  modified_base 1: mod_base = OTHER; note = thymine
  misc_feature 1..18: note = Antisense oligonucleotide
  modified_base 1: mod_base = OTHER; note = misc_feature - bicyclic nucleic acid scaffold modification
  modified_base 18: mod_base = OTHER; note = misc_feature - bicyclic nucleic acid scaffold modification
  source 1..18: mol_type = other RNA
tgtatttagcatgttccc

SEQ ID NO: 1769 - RNA, 18 nt, synthetic construct
  modified_base 1: mod_base = OTHER; note = thymine
  misc_feature 1..18: note = Antisense oligonucleotide
  modified_base 1: mod_base = OTHER; note = misc_feature - bicyclic nucleic acid scaffold modification
  modified_base 9: mod_base = OTHER; note = misc_feature - bicyclic nucleic acid scaffold modification
  modified_base 18: mod_base = OTHER; note = misc_feature - bicyclic nucleic acid scaffold modification
  source 1..18: mol_type = other RNA
tgtatttagcatgttccc

SEQ ID NO: 1770 - RNA, 18 nt, synthetic construct
  modified_base 1: mod_base = OTHER; note = thymine
  misc_feature 1..18: note = Antisense oligonucleotide
  modified_base 1: mod_base = OTHER; note = misc_feature - bicyclic nucleic acid scaffold modification
  modified_base 13: mod_base = OTHER; note = misc_feature - bicyclic nucleic acid scaffold modification
  modified_base 18: mod_base = OTHER; note = misc_feature - bicyclic nucleic acid scaffold modification
  source 1..18: mol_type = other RNA
tgtatttagcatgttccc

SEQ ID NO: 1771 - RNA, 18 nt, synthetic construct
  modified_base 1: mod_base = OTHER; note = thymine
  misc_feature 1..18: note = Antisense oligonucleotide
  modified_base 1..2: mod_base = OTHER; note = misc_feature - bicyclic nucleic acid scaffold modification
  modified_base 18: mod_base = OTHER; note = misc_feature - bicyclic nucleic acid scaffold modification
  source 1..18: mol_type = other RNA
tgtatttagcatgttccc

SEQ ID NO: 1772 - RNA, 18 nt, synthetic construct
  modified_base 1: mod_base = OTHER; note = thymine
  misc_feature 1..18: note = Antisense oligonucleotide
  modified_base 1: mod_base = OTHER; note = misc_feature - bicyclic nucleic acid scaffold modification
  modified_base 9..10: mod_base = OTHER; note = misc_feature - bicyclic nucleic acid scaffold modification
  modified_base 18: mod_base = OTHER; note = misc_feature - bicyclic nucleic acid scaffold modification
  source 1..18: mol_type = other RNA
tgtatttagcatgttccc

SEQ ID NO: 1773 - RNA, 18 nt, synthetic construct
  modified_base 1: mod_base = OTHER; note = thymine
  misc_feature 1..18: note = Antisense oligonucleotide
  modified_base 1..2: mod_base = OTHER; note = misc_feature - bicyclic nucleic acid scaffold modification
  modified_base 9: mod_base = OTHER; note = misc_feature - bicyclic nucleic acid scaffold modification
  modified_base 17..18: mod_base = OTHER; note = misc_feature - bicyclic nucleic acid scaffold modification
  source 1..18: mol_type = other RNA
tgtatttagcatgttccc

SEQ ID NO: 1774 - RNA, 16 nt, synthetic construct
  misc_feature 1..16: note = Antisense oligonucleotide
  modified_base 1: mod_base = OTHER; note = misc_feature - bicyclic nucleic acid scaffold modification
  modified_base 16: mod_base = OTHER; note = misc_feature - bicyclic nucleic acid scaffold modification
  source 1..16: mol_type = other RNA
ccatttgtatttagca

SEQ ID NO: 1775 - RNA, 16 nt, synthetic construct
  misc_feature 1..16: note = Antisense oligonucleotide
  modified_base 1: mod_base = OTHER; note = misc_feature - bicyclic nucleic acid scaffold modification
  modified_base 7: mod_base = OTHER; note = misc_feature - bicyclic nucleic acid scaffold modification
  modified_base 16: mod_base = OTHER; note = misc_feature - bicyclic nucleic acid scaffold modification
  source 1..16: mol_type = other RNA
ccatttgtatttagca

SEQ ID NO: 1776 - RNA, 16 nt, synthetic construct
  misc_feature 1..16: note = Antisense oligonucleotide
  modified_base 1: mod_base = OTHER; note = misc_feature - bicyclic nucleic acid scaffold modification
  modified_base 14: mod_base = OTHER; note = misc_feature - bicyclic nucleic acid scaffold modification
  modified_base 16: mod_base = OTHER; note = misc_feature - bicyclic nucleic acid scaffold modification
  source 1..16: mol_type = other RNA
ccatttgtatttagca

SEQ ID NO: 1777 - RNA, 16 nt, synthetic construct
  misc_feature 1..16: note = Antisense oligonucleotide
  modified_base 1: mod_base = OTHER; note = misc_feature - bicyclic nucleic acid scaffold modification
  modified_base 7: mod_base = OTHER; note = misc_feature - bicyclic nucleic acid scaffold modification
  modified_base 14: mod_base = OTHER; note = misc_feature - bicyclic nucleic acid scaffold modification
  modified_base 16: mod_base = OTHER; note = misc_feature - bicyclic nucleic acid scaffold modification
  source 1..16: mol_type = other RNA
ccatttgtatttagca

SEQ ID NO: 1778 - RNA, 16 nt, synthetic construct
  misc_feature 1..16: note = Antisense oligonucleotide
  modified_base 1..2: mod_base = OTHER; note = misc_feature - bicyclic nucleic acid scaffold modification
  modified_base 15..16: mod_base = OTHER; note = misc_feature - bicyclic nucleic acid scaffold modification
  source 1..16: mol_type = other RNA
ccatttgtatttagca

SEQ ID NO: 1779 - RNA, 16 nt, synthetic construct
  misc_feature 1..16: note = Antisense oligonucleotide
  modified_base 1: mod_base = OTHER; note = misc_feature - bicyclic nucleic acid scaffold modification
  modified_base 14: mod_base = OTHER; note = misc_feature - bicyclic nucleic acid scaffold modification
  modified_base 16: mod_base = OTHER; note = misc_feature - bicyclic nucleic acid scaffold modification
  source 1..16: mol_type = other RNA
ccatttgtatttagca

SEQ ID NO: 1780 - RNA, 16 nt, synthetic construct
  misc_feature 1..16: note = Antisense oligonucleotide
  modified_base 1..2: mod_base = OTHER; note = misc_feature - bicyclic nucleic acid scaffold modification
  modified_base 7: mod_base = OTHER; note = misc_feature - bicyclic nucleic acid scaffold modification
  modified_base 16: mod_base = OTHER; note = misc_feature - bicyclic nucleic acid scaffold modification
  source 1..16: mol_type = other RNA
ccatttgtatttagca

SEQ ID NO: 1781 - RNA, 16 nt, synthetic construct
  modified_base 16: mod_base = OTHER; note = thymine
  misc_feature 1..16: note = Antisense oligonucleotide
  modified_base 1: mod_base = OTHER; note = misc_feature - bicyclic nucleic acid scaffold modification
  modified_base 16: mod_base = OTHER; note = misc_feature - bicyclic nucleic acid scaffold modification
  source 1..16: mol_type = other RNA
catttgtatttagcat

SEQ ID NO: 1782 - RNA, 16 nt, synthetic construct
  modified_base 16: mod_base = OTHER; note = thymine
  misc_feature 1..16: note = Antisense oligonucleotide
  modified_base 1: mod_base = OTHER; note = misc_feature - bicyclic nucleic acid scaffold modification
  modified_base 6: mod_base = OTHER; note = misc_feature - bicyclic nucleic acid scaffold modification
  modified_base 16: mod_base = OTHER; note = misc_feature - bicyclic nucleic acid scaffold modification
  source 1..16: mol_type = other RNA
catttgtatttagcat

SEQ ID NO: 1783 - RNA, 16 nt, synthetic construct
  modified_base 16: mod_base = OTHER; note = thymine
  misc_feature 1..16: note = Antisense oligonucleotide
  modified_base 1: mod_base = OTHER; note = misc_feature - bicyclic nucleic acid scaffold modification
  modified_base 13: mod_base = OTHER; note = misc_feature - bicyclic nucleic acid scaffold modification
  modified_base 16: mod_base = OTHER; note = misc_feature - bicyclic nucleic acid scaffold modification
  source 1..16: mol_type = other RNA
catttgtatttagcat

SEQ ID NO: 1784 - RNA, 16 nt, synthetic construct
  modified_base 16: mod_base = OTHER; note = thymine
  misc_feature 1..16: note = Antisense oligonucleotide
  modified_base 1: mod_base = OTHER; note = misc_feature - bicyclic nucleic acid scaffold modification
  modified_base 14: mod_base = OTHER; note = misc_feature - bicyclic nucleic acid scaffold modification
  modified_base 16: mod_base = OTHER; note = misc_feature - bicyclic nucleic acid scaffold modification
  source 1..16: mol_type = other RNA
catttgtatttagcat

SEQ ID NO: 1785 - RNA, 16 nt, synthetic construct
  modified_base 16: mod_base = OTHER; note = thymine
  misc_feature 1..16: note = Antisense oligonucleotide
  modified_base 1: mod_base = OTHER; note = misc_feature - bicyclic nucleic acid scaffold modification
  modified_base 6: mod_base = OTHER; note = misc_feature - bicyclic nucleic acid scaffold modification
  modified_base 13: mod_base = OTHER; note = misc_feature - bicyclic nucleic acid scaffold modification
  modified_base 16: mod_base = OTHER; note = misc_feature - bicyclic nucleic acid scaffold modification
  source 1..16: mol_type = other RNA
catttgtatttagcat

SEQ ID NO: 1786 - RNA, 16 nt, synthetic construct
  modified_base 16: mod_base = OTHER; note = thymine
  misc_feature 1..16: note = Antisense oligonucleotide
  modified_base 1: mod_base = OTHER; note = misc_feature - bicyclic nucleic acid scaffold modification
  modified_base 6: mod_base = OTHER; note = misc_feature - bicyclic nucleic acid scaffold modification
  modified_base 13..14: mod_base = OTHER; note = misc_feature - bicyclic nucleic acid scaffold modification
  modified_base 16: mod_base = OTHER; note = misc_feature - bicyclic nucleic acid scaffold modification
  source 1..16: mol_type = other RNA
catttgtatttagcat

SEQ ID NO: 1787 - RNA, 16 nt, synthetic construct
  modified_base 16: mod_base = OTHER; note = thymine
  misc_feature 1..16: note = Antisense oligonucleotide
  modified_base 1..2: mod_base = OTHER; note = misc_feature - bicyclic nucleic acid scaffold modification
  modified_base 6: mod_base = OTHER; note = misc_feature - bicyclic nucleic acid scaffold modification
  modified_base 15..16: mod_base = OTHER; note = misc_feature - bicyclic nucleic acid scaffold modification
  source 1..16: mol_type = other RNA
catttgtatttagcat

SEQ ID NO: 1788 - RNA, 16 nt, synthetic construct
  modified_base 16: mod_base = OTHER; note = thymine
  misc_feature 1..16: note = Antisense oligonucleotide
  modified_base 1: mod_base = OTHER; note = misc_feature - bicyclic nucleic acid scaffold modification
  modified_base 16: mod_base = OTHER; note = misc_feature - bicyclic nucleic acid scaffold modification
  source 1..16: mol_type = other RNA
catttgtatttagcat

SEQ ID NO: 1789 - RNA, 16 nt, synthetic construct
  misc_feature 1..16: note = Antisense oligonucleotide
  modified_base 1: mod_base = OTHER; note = misc_feature - bicyclic nucleic acid scaffold modification
  modified_base 16: mod_base = OTHER; note = misc_feature - bicyclic nucleic acid scaffold modification
  source 1..16: mol_type = other RNA
atttgtatttagcatg

SEQ ID NO: 1790 - RNA, 16 nt, synthetic construct
  misc_feature 1..16: note = Antisense oligonucleotide
  modified_base 1: mod_base = OTHER; note = misc_feature - bicyclic nucleic acid scaffold modification
  modified_base 5: mod_base = OTHER; note = misc_feature - bicyclic nucleic acid scaffold modification
  modified_base 16: mod_base = OTHER; note = misc_feature - bicyclic nucleic acid scaffold modification
  source 1..16: mol_type = other RNA
atttgtatttagcatg

SEQ ID NO: 1791 - RNA, 16 nt, synthetic construct
  misc_feature 1..16: note = Antisense oligonucleotide
  modified_base 1: mod_base = OTHER; note = misc_feature - bicyclic nucleic acid scaffold modification
  modified_base 12: mod_base = OTHER; note = misc_feature - bicyclic nucleic acid scaffold modification
  modified_base 16: mod_base = OTHER; note = misc_feature - bicyclic nucleic acid scaffold modification
  source 1..16: mol_type = other RNA
atttgtatttagcatg

SEQ ID NO: 1792 - RNA, 16 nt, synthetic construct
  misc_feature 1..16: note = Antisense oligonucleotide
  modified_base 1: mod_base = OTHER; note = misc_feature - bicyclic nucleic acid scaffold modification
  modified_base 13: mod_base = OTHER; note = misc_feature - bicyclic nucleic acid scaffold modification
  modified_base 16: mod_base = OTHER; note = misc_feature - bicyclic nucleic acid scaffold modification
  source 1..16: mol_type = other RNA
atttgtatttagcatg

SEQ ID NO: 1793 - RNA, 16 nt, synthetic construct
  misc_feature 1..16: note = Antisense oligonucleotide
  modified_base 1: mod_base = OTHER; note = misc_feature - bicyclic nucleic acid scaffold modification
  modified_base 5: mod_base = OTHER; note = misc_feature - bicyclic nucleic acid scaffold modification
  modified_base 12: mod_base = OTHER; note = misc_feature - bicyclic nucleic acid scaffold modification
  modified_base 16: mod_base = OTHER; note = misc_feature - bicyclic nucleic acid scaffold modification
  source 1..16: mol_type = other RNA
atttgtatttagcatg

SEQ ID NO: 1794 - RNA, 16 nt, synthetic construct
  misc_feature 1..16: note = Antisense oligonucleotide
  modified_base 1: mod_base = OTHER; note = misc_feature - bicyclic nucleic acid scaffold modification
  modified_base 5: mod_base = OTHER; note = misc_feature - bicyclic nucleic acid scaffold modification
  modified_base 12..13: mod_base = OTHER; note = misc_feature - bicyclic nucleic acid scaffold modification
  modified_base 16: mod_base = OTHER; note = misc_feature - bicyclic nucleic acid scaffold modification
  source 1..16: mol_type = other RNA
atttgtatttagcatg

SEQ ID NO: 1795 - RNA, 16 nt, synthetic construct
  modified_base 2: mod_base = OTHER; note = thymine
  modified_base 15: mod_base = OTHER; note = thymine
  misc_feature 1..16: note = Antisense oligonucleotide
  modified_base 1..2: mod_base = OTHER; note = misc_feature - bicyclic nucleic acid scaffold modification
  modified_base 15..16: mod_base = OTHER; note = misc_feature - bicyclic nucleic acid scaffold modification
  source 1..16: mol_type = other RNA
atttgtatttagcatg

SEQ ID NO: 1796 - RNA, 16 nt, synthetic construct
  modified_base 2: mod_base = OTHER; note = thymine
  modified_base 15: mod_base = OTHER; note = thymine
  misc_feature 1..16: note = Antisense oligonucleotide
  modified_base 1..2: mod_base = OTHER; note = misc_feature - bicyclic nucleic acid scaffold modification
  modified_base 5: mod_base = OTHER; note = misc_feature - bicyclic nucleic acid scaffold modification
  modified_base 12: mod_base = OTHER; note = misc_feature - bicyclic nucleic acid scaffold modification
  modified_base 15..16: mod_base = OTHER; note = misc_feature - bicyclic nucleic acid scaffold modification
  source 1..16: mol_type = other RNA
atttgtatttagcatg

SEQ ID NO: 1797 - RNA, 16 nt, synthetic construct
  modified_base 1: mod_base = OTHER; note = thymine
  modified_base 16: mod_base = OTHER; note = thymine
  misc_feature 1..16: note = Antisense oligonucleotide
  modified_base 1: mod_base = OTHER; note = misc_feature - bicyclic nucleic acid scaffold modification
  modified_base 16: mod_base = OTHER; note = misc_feature - bicyclic nucleic acid scaffold modification
  source 1..16: mol_type = other RNA
tttgtatttagcatgt

SEQ ID NO: 1798 - RNA, 16 nt, synthetic construct
  modified_base 1: mod_base = OTHER; note = thymine
  modified_base 16: mod_base = OTHER; note = thymine
  misc_feature 1..16: note = Antisense oligonucleotide
  modified_base 1: mod_base = OTHER; note = misc_feature - bicyclic nucleic acid scaffold modification
  modified_base 4: mod_base = OTHER; note = misc_feature - bicyclic nucleic acid scaffold modification
  modified_base 16: mod_base = OTHER; note = misc_feature - bicyclic nucleic acid scaffold modification
  source 1..16: mol_type = other RNA
tttgtatttagcatgt

SEQ ID NO: 1799 - RNA, 16 nt, synthetic construct
  modified_base 1: mod_base = OTHER; note = thymine
  modified_base 16: mod_base = OTHER; note = thymine
  misc_feature 1..16: note = Antisense oligonucleotide
  modified_base 1: mod_base = OTHER; note = misc_feature - bicyclic nucleic acid scaffold modification
  modified_base 11: mod_base = OTHER; note = misc_feature - bicyclic nucleic acid scaffold modification
  modified_base 16: mod_base = OTHER; note = misc_feature - bicyclic nucleic acid scaffold modification
  source 1..16: mol_type = other RNA
tttgtatttagcatgt

SEQ ID NO: 1800 - RNA, 16 nt, synthetic construct
  modified_base 1: mod_base = OTHER; note = thymine
  modified_base 16: mod_base = OTHER; note = thymine
  misc_feature 1..16: note = Antisense oligonucleotide
  modified_base 1: mod_base = OTHER; note = misc_feature - bicyclic nucleic acid scaffold modification
  modified_base 15..16: mod_base = OTHER; note = misc_feature - bicyclic nucleic acid scaffold modification
  source 1..16: mol_type = other RNA
tttgtatttagcatgt

SEQ ID NO: 1801 - RNA, 16 nt, synthetic construct
  modified_base 1: mod_base = OTHER; note = thymine
  modified_base 16: mod_base = OTHER; note = thymine
  misc_feature 1..16: note = Antisense oligonucleotide
  modified_base 1: mod_base = OTHER; note = misc_feature - bicyclic nucleic acid scaffold modification
  modified_base 4: mod_base = OTHER; note = misc_feature - bicyclic nucleic acid scaffold modification
  modified_base 11: mod_base = OTHER; note = misc_feature - bicyclic nucleic acid scaffold modification
  modified_base 16: mod_base = OTHER; note = misc_feature - bicyclic nucleic acid scaffold modification
  source 1..16: mol_type = other RNA
tttgtatttagcatgt

SEQ ID NO: 1802 - RNA, 16 nt, synthetic construct
  modified_base 1: mod_base = OTHER; note = thymine
  modified_base 16: mod_base = OTHER; note = thymine
  misc_feature 1..16: note = Antisense oligonucleotide
  modified_base 1..2: mod_base = OTHER; note = misc_feature - bicyclic nucleic acid scaffold modification
  modified_base 4: mod_base = OTHER; note = misc_feature - bicyclic nucleic acid scaffold modification
  modified_base 11: mod_base = OTHER; note = misc_feature - bicyclic nucleic acid scaffold modification
  modified_base 15..16: mod_base = OTHER; note = misc_feature - bicyclic nucleic acid scaffold modification
  source 1..16: mol_type = other RNA
tttgtatttagcatgt

SEQ ID NO: 1803 - RNA, 16 nt, synthetic construct
  modified_base 1..2: mod_base = OTHER; note = thymine
  modified_base 16: mod_base = OTHER; note = thymine
  misc_feature 1..16: note = Antisense oligonucleotide
  modified_base 1..2: mod_base = OTHER; note = misc_feature - bicyclic nucleic acid scaffold modification
  modified_base 15..16: mod_base = OTHER; note = misc_feature - bicyclic nucleic acid scaffold modification
  source 1..16: mol_type = other RNA
tttgtatttagcatgt

SEQ ID NO: 1804 - RNA, 16 nt, synthetic construct
  modified_base 1..2: mod_base = OTHER; note = thymine
  modified_base 16: mod_base = OTHER; note = thymine
  misc_feature 1..16: note = Antisense oligonucleotide
  modified_base 1..2: mod_base = OTHER; note = misc_feature - bicyclic nucleic acid scaffold modification
  modified_base 11: mod_base = OTHER; note = misc_feature - bicyclic nucleic acid scaffold modification
  modified_base 15..16: mod_base = OTHER; note = misc_feature - bicyclic nucleic acid scaffold modification
  source 1..16: mol_type = other RNA
tttgtatttagcatgt

SEQ ID NO: 1805 - RNA, 16 nt, synthetic construct
  modified_base 1: mod_base = OTHER; note = thymine
  modified_base 16: mod_base = OTHER; note = thymine
  misc_feature 1..16: note = Antisense oligonucleotide
  modified_base 1: mod_base = OTHER; note = misc_feature - bicyclic nucleic acid scaffold modification
  modified_base 16: mod_base = OTHER; note = misc_feature - bicyclic nucleic acid scaffold modification
  source 1..16: mol_type = other RNA
ttgtatttagcatgtt

SEQ ID NO: 1806 - RNA, 16 nt, synthetic construct
  modified_base 1: mod_base = OTHER; note = thymine
  modified_base 16: mod_base = OTHER; note = thymine
  misc_feature 1..16: note = Antisense oligonucleotide
  modified_base 1: mod_base = OTHER; note = misc_feature - bicyclic nucleic acid scaffold modification
  modified_base 3: mod_base = OTHER; note = misc_feature - bicyclic nucleic acid scaffold modification
  modified_base 16: mod_base = OTHER; note = misc_feature - bicyclic nucleic acid scaffold modification
  source 1..16: mol_type = other RNA
ttgtatttagcatgtt

SEQ ID NO: 1807 - RNA, 16 nt, synthetic construct
  modified_base 1: mod_base = OTHER; note = thymine
  modified_base 16: mod_base = OTHER; note = thymine
  misc_feature 1..16: note = Antisense oligonucleotide
  modified_base 1: mod_base = OTHER; note = misc_feature - bicyclic nucleic acid scaffold modification
  modified_base 16: mod_base = OTHER; note = misc_feature - bicyclic nucleic acid scaffold modification
  source 1..16: mol_type = other RNA
ttgtatttagcatgtt

SEQ ID NO: 1808 - RNA, 16 nt, synthetic construct
  modified_base 1: mod_base = OTHER; note = thymine
  modified_base 16: mod_base = OTHER; note = thymine
  misc_feature 1..16: note = Antisense oligonucleotide
  modified_base 1: mod_base = OTHER; note = misc_feature - bicyclic nucleic acid scaffold modification
  modified_base 10: mod_base = OTHER; note = misc_feature - bicyclic nucleic acid scaffold modification
  modified_base 16: mod_base = OTHER; note = misc_feature - bicyclic nucleic acid scaffold modification
  source 1..16: mol_type = other RNA
ttgtatttagcatgtt

SEQ ID NO: 1809 - RNA, 16 nt, synthetic construct
  modified_base 1: mod_base = OTHER; note = thymine
  modified_base 16: mod_base = OTHER; note = thymine
  misc_feature 1..16: note = Antisense oligonucleotide
  modified_base 1: mod_base = OTHER; note = misc_feature - bicyclic nucleic acid scaffold modification
  modified_base 10: mod_base = OTHER; note = misc_feature - bicyclic nucleic acid scaffold modification
  modified_base 14: mod_base = OTHER; note = misc_feature - bicyclic nucleic acid scaffold modification
  modified_base 16: mod_base = OTHER; note = misc_feature - bicyclic nucleic acid scaffold modification
  source 1..16: mol_type = other RNA
ttgtatttagcatgtt

SEQ ID NO: 1810 - RNA, 16 nt, synthetic construct
  modified_base 1: mod_base = OTHER; note = thymine
  modified_base 16: mod_base = OTHER; note = thymine
  misc_feature 1..16: note = Antisense oligonucleotide
  modified_base 1: mod_base = OTHER; note = misc_feature - bicyclic nucleic acid scaffold modification
  modified_base 3: mod_base = OTHER; note = misc_feature - bicyclic nucleic acid scaffold modification
  modified_base 14: mod_base = OTHER; note = misc_feature - bicyclic nucleic acid scaffold modification
  modified_base 16: mod_base = OTHER; note = misc_feature - bicyclic nucleic acid scaffold modification
  source 1..16: mol_type = other RNA
ttgtatttagcatgtt

SEQ ID NO: 1811 - RNA, 16 nt, synthetic construct
  modified_base 1: mod_base = OTHER; note = thymine
  modified_base 16: mod_base = OTHER; note = thymine
  misc_feature 1..16: note = Antisense oligonucleotide
  modified_base 1: mod_base = OTHER; note = misc_feature - bicyclic nucleic acid scaffold modification
  modified_base 3: mod_base = OTHER; note = misc_feature - bicyclic nucleic acid scaffold modification
  modified_base 10: mod_base = OTHER; note = misc_feature - bicyclic nucleic acid scaffold modification
  modified_base 14: mod_base = OTHER; note = misc_feature - bicyclic nucleic acid scaffold modification
  modified_base 16: mod_base = OTHER; note = misc_feature - bicyclic nucleic acid scaffold modification
  source 1..16: mol_type = other RNA
ttgtatttagcatgtt

SEQ ID NO: 1812 - RNA, 16 nt, synthetic construct
  modified_base 1: mod_base = OTHER; note = thymine
  modified_base 15..16: mod_base = OTHER; note = thymine
  misc_feature 1..16: note = Antisense oligonucleotide
  modified_base 1..2: mod_base = OTHER; note = misc_feature - bicyclic nucleic acid scaffold modification
  modified_base 15..16: mod_base = OTHER; note = misc_feature - bicyclic nucleic acid scaffold modification
  source 1..16: mol_type = other RNA
ttgtatttagcatgtt

SEQ ID NO: 1813 - RNA, 16 nt, synthetic construct
  modified_base 1: mod_base = OTHER; note = thymine
  misc_feature 1..16: note = Antisense oligonucleotide
  modified_base 1: mod_base = OTHER; note = misc_feature - bicyclic nucleic acid scaffold modification
  modified_base 16: mod_base = OTHER; note = misc_feature - bicyclic nucleic acid scaffold modification
  source 1..16: mol_type = other RNA
tgtatttagcatgttc

SEQ ID NO: 1814 - RNA, 16 nt, synthetic construct
  modified_base 1: mod_base = OTHER; note = thymine
  misc_feature 1..16: note = Antisense oligonucleotide
  modified_base 1: mod_base = OTHER; note = misc_feature - bicyclic nucleic acid scaffold modification
  modified_base 9: mod_base = OTHER; note = misc_feature - bicyclic nucleic acid scaffold modification
  modified_base 16: mod_base = OTHER; note = misc_feature - bicyclic nucleic acid scaffold modification
  source 1..16: mol_type = other RNA
tgtatttagcatgttc

SEQ ID NO: 1815 - RNA, 16 nt, synthetic construct
  modified_base 1: mod_base = OTHER; note = thymine
  misc_feature 1..16: note = Antisense oligonucleotide
  modified_base 1: mod_base = OTHER; note = misc_feature - bicyclic nucleic acid scaffold modification
  modified_base 13: mod_base = OTHER; note = misc_feature - bicyclic nucleic acid scaffold modification
  modified_base 16: mod_base = OTHER; note = misc_feature - bicyclic nucleic acid scaffold modification
  source 1..16: mol_type = other RNA
tgtatttagcatgttc

SEQ ID NO: 1816 - RNA, 16 nt, synthetic construct
  modified_base 1: mod_base = OTHER; note = thymine
  misc_feature 1..16: note = Antisense oligonucleotide
  modified_base 1: mod_base = OTHER; note = misc_feature - bicyclic nucleic acid scaffold modification
  modified_base 10: mod_base = OTHER; note = misc_feature - bicyclic nucleic acid scaffold modification
  modified_base 13: mod_base = OTHER; note = misc_feature - bicyclic nucleic acid scaffold modification
  modified_base 16: mod_base = OTHER; note = misc_feature - bicyclic nucleic acid scaffold modification
  source 1..16: mol_type = other RNA
tgtatttagcatgttc

SEQ ID NO: 1817 - RNA, 16 nt, synthetic construct
  modified_base 1: mod_base = OTHER; note = thymine
  misc_feature 1..16: note = Antisense oligonucleotide
  modified_base 1..2: mod_base = OTHER; note = misc_feature - bicyclic nucleic acid scaffold modification
  modified_base 9: mod_base = OTHER; note = misc_feature - bicyclic nucleic acid scaffold modification
  modified_base 16: mod_base = OTHER; note = misc_feature - bicyclic nucleic acid scaffold modification
  source 1..16: mol_type = other RNA
tgtatttagcatgttc

SEQ ID NO: 1818 - RNA, 16 nt, synthetic construct
  modified_base 1: mod_base = OTHER; note = thymine
  misc_feature 1..16: note = Antisense oligonucleotide
  modified_base 1..2: mod_base = OTHER; note = misc_feature - bicyclic nucleic acid scaffold modification
  modified_base 9..10: mod_base = OTHER; note = misc_feature - bicyclic nucleic acid scaffold modification
  modified_base 13: mod_base = OTHER; note = misc_feature - bicyclic nucleic acid scaffold modification
  modified_base 16: mod_base = OTHER; note = misc_feature - bicyclic nucleic acid scaffold modification
  source 1..16: mol_type = other RNA
tgtatttagcatgttc

SEQ ID NO: 1819 - RNA, 16 nt, synthetic construct
  modified_base 1: mod_base = OTHER; note = thymine
  misc_feature 1..16: note = Antisense oligonucleotide
  modified_base 1..2: mod_base = OTHER; note = misc_feature - bicyclic nucleic acid scaffold modification
  modified_base 9: mod_base = OTHER; note = misc_feature - bicyclic nucleic acid scaffold modification
  modified_base 13: mod_base = OTHER; note = misc_feature - bicyclic nucleic acid scaffold modification
  modified_base 16: mod_base = OTHER; note = misc_feature - bicyclic nucleic acid scaffold modification
  source 1..16: mol_type = other RNA
tgtatttagcatgttc

SEQ ID NO: 1820 - RNA, 16 nt, synthetic construct
  misc_feature 1..16: note = Antisense oligonucleotide
  modified_base 1: mod_base = OTHER; note = misc_feature - bicyclic nucleic acid scaffold modification
  modified_base 16: mod_base = OTHER; note = misc_feature - bicyclic nucleic acid scaffold modification
  source 1..16: mol_type = other RNA
gtatttagcatgttcc

SEQ ID NO: 1821 - RNA, 16 nt, synthetic construct
  misc_feature 1..16: note = Antisense oligonucleotide
  modified_base 1: mod_base = OTHER; note = misc_feature - bicyclic nucleic acid scaffold modification
  modified_base 8: mod_base = OTHER; note = misc_feature - bicyclic nucleic acid scaffold modification
  modified_base 16: mod_base = OTHER; note = misc_feature - bicyclic nucleic acid scaffold modification
  source 1..16: mol_type = other RNA
gtatttagcatgttcc

SEQ ID NO: 1822 - RNA, 16 nt, synthetic construct
  misc_feature 1..16: note = Antisense oligonucleotide
  modified_base 1: mod_base = OTHER; note = misc_feature - bicyclic nucleic acid scaffold modification
  modified_base 9: mod_base = OTHER; note = misc_feature - bicyclic nucleic acid scaffold modification
  modified_base 16: mod_base = OTHER; note = misc_feature - bicyclic nucleic acid scaffold modification
  source 1..16: mol_type = other RNA
gtatttagcatgttcc

SEQ ID NO: 1823 - RNA, 16 nt, synthetic construct
  misc_feature 1..16: note = Antisense oligonucleotide
  modified_base 1: mod_base = OTHER; note = misc_feature - bicyclic nucleic acid scaffold modification
  modified_base 12: mod_base = OTHER; note = misc_feature - bicyclic nucleic acid scaffold modification
  modified_base 16: mod_base = OTHER; note = misc_feature - bicyclic nucleic acid scaffold modification
  source 1..16: mol_type = other RNA
gtatttagcatgttcc

SEQ ID NO: 1824 - RNA, 16 nt, synthetic construct
  misc_feature 1..16: note = Antisense oligonucleotide
  modified_base 1: mod_base = OTHER; note = misc_feature - bicyclic nucleic acid scaffold modification
  modified_base 8: mod_base = OTHER; note = misc_feature - bicyclic nucleic acid scaffold modification
  modified_base 12: mod_base = OTHER; note = misc_feature - bicyclic nucleic acid scaffold modification
  modified_base 16: mod_base = OTHER; note = misc_feature - bicyclic nucleic acid scaffold modification
  source 1..16: mol_type = other RNA
gtatttagcatgttcc

SEQ ID NO: 1825 - RNA, 16 nt, synthetic construct
  misc_feature 1..16: note = Antisense oligonucleotide
  modified_base 1: mod_base = OTHER; note = misc_feature - bicyclic nucleic acid scaffold modification
  modified_base 8..9: mod_base = OTHER; note = misc_feature - bicyclic nucleic acid scaffold modification
  modified_base 12: mod_base = OTHER; note = misc_feature - bicyclic nucleic acid scaffold modification
  modified_base 16: mod_base = OTHER; note = misc_feature - bicyclic nucleic acid scaffold modification
  source 1..16: mol_type = other RNA
gtatttagcatgttcc

SEQ ID NO: 1826 - RNA, 16 nt, synthetic construct
  modified_base 2: mod_base = OTHER; note = thymine
  misc_feature 1..16: note = Antisense oligonucleotide
  modified_base 1..2: mod_base = OTHER; note = misc_feature - bicyclic nucleic acid scaffold modification
  modified_base 8..9: mod_base = OTHER; note = misc_feature - bicyclic nucleic acid scaffold modification
  modified_base 15..16: mod_base = OTHER; note = misc_feature - bicyclic nucleic acid scaffold modification
  source 1..16: mol_type = other RNA
gtatttagcatgttcc

SEQ ID NO: 1827 - RNA, 16 nt, synthetic construct
  misc_feature 1..16: note = Antisense oligonucleotide
  modified_base 1: mod_base = OTHER; note = misc_feature - bicyclic nucleic acid scaffold modification
  modified_base 8..9: mod_base = OTHER; note = misc_feature - bicyclic nucleic acid scaffold modification
  modified_base 16: mod_base = OTHER; note = misc_feature - bicyclic nucleic acid scaffold modification
  source 1..16: mol_type = other RNA
gtatttagcatgttcc

SEQ ID NO: 1828 - RNA, 16 nt, synthetic construct
  modified_base 1: mod_base = OTHER; note = thymine
  misc_feature 1..16: note = Antisense oligonucleotide
  modified_base 1: mod_base = OTHER; note = misc_feature - bicyclic nucleic acid scaffold modification
  modified_base 16: mod_base = OTHER; note = misc_feature - bicyclic nucleic acid scaffold modification
  source 1..16: mol_type = other RNA
tatttagcatgttccc

SEQ ID NO: 1829 - RNA, 16 nt, synthetic construct
  modified_base 1: mod_base = OTHER; note = thymine
  misc_feature 1..16: note = Antisense oligonucleotide
  modified_base 1: mod_base = OTHER; note = misc_feature - bicyclic nucleic acid scaffold modification
  modified_base 7: mod_base = OTHER; note = misc_feature - bicyclic nucleic acid scaffold modification
  modified_base 16: mod_base = OTHER; note = misc_feature - bicyclic nucleic acid scaffold modification
  source 1..16: mol_type = other RNA
tatttagcatgttccc

SEQ ID NO: 1830 - RNA, 16 nt, synthetic construct
  modified_base 1: mod_base = OTHER; note = thymine
  misc_feature 1..16: note = Antisense oligonucleotide
  modified_base 1: mod_base = OTHER; note = misc_feature - bicyclic nucleic acid scaffold modification
  modified_base 8: mod_base = OTHER; note = misc_feature - bicyclic nucleic acid scaffold modification
  modified_base 16: mod_base = OTHER; note = misc_feature - bicyclic nucleic acid scaffold modification
  source 1..16: mol_type = other RNA
tatttagcatgttccc

SEQ ID NO: 1831 - RNA, 16 nt, synthetic construct
  modified_base 1: mod_base = OTHER; note = thymine
  misc_feature 1..16: note = Antisense oligonucleotide
  modified_base 1: mod_base = OTHER; note = misc_feature - bicyclic nucleic acid scaffold modification
  modified_base 11: mod_base = OTHER; note = misc_feature - bicyclic nucleic acid scaffold modification
  modified_base 16: mod_base = OTHER; note = misc_feature - bicyclic nucleic acid scaffold modification
  source 1..16: mol_type = other RNA
tatttagcatgttccc

SEQ ID NO: 1832 - RNA, 16 nt, synthetic construct
  modified_base 1: mod_base = OTHER; note = thymine
  misc_feature 1..16: note = Antisense oligonucleotide
  modified_base 1: mod_base = OTHER; note = misc_feature - bicyclic nucleic acid scaffold modification
  modified_base 14: mod_base = OTHER; note = misc_feature - bicyclic nucleic acid scaffold modification
  modified_base 16: mod_base = OTHER; note = misc_feature - bicyclic nucleic acid scaffold modification
  source 1..16: mol_type = other RNA
tatttagcatgttccc

SEQ ID NO: 1833 - RNA, 16 nt, synthetic construct
  modified_base 1: mod_base = OTHER; note = thymine
  misc_feature 1..16: note = Antisense oligonucleotide
  modified_base 1: mod_base = OTHER; note = misc_feature - bicyclic nucleic acid scaffold modification
  modified_base 8: mod_base = OTHER; note = misc_feature - bicyclic nucleic acid scaffold modification
  modified_base 14: mod_base = OTHER; note = misc_feature - bicyclic nucleic acid scaffold modification
  modified_base 16: mod_base = OTHER; note = misc_feature - bicyclic nucleic acid scaffold modification
  source 1..16: mol_type = other RNA
tatttagcatgttccc

SEQ ID NO: 1834 - RNA, 16 nt, synthetic construct
  modified_base 1: mod_base = OTHER; note = thymine
  misc_feature 1..16: note = Antisense oligonucleotide
  modified_base 1: mod_base = OTHER; note = misc_feature - bicyclic nucleic acid scaffold modification
  modified_base 7: mod_base = OTHER; note = misc_feature - bicyclic nucleic acid scaffold modification
  modified_base 11: mod_base = OTHER; note = misc_feature - bicyclic nucleic acid scaffold modification
  modified_base 16: mod_base = OTHER; note = misc_feature - bicyclic nucleic acid scaffold modification
  source 1..16: mol_type = other RNA
tatttagcatgttccc

SEQ ID NO: 1835 - RNA, 16 nt, synthetic construct
  modified_base 1: mod_base = OTHER; note = thymine
  misc_feature 1..16: note = Antisense oligonucleotide
  modified_base 1: mod_base = OTHER; note = misc_feature - bicyclic nucleic acid scaffold modification
  modified_base 7: mod_base = OTHER; note = misc_feature - bicyclic nucleic acid scaffold modification
  modified_base 11: mod_base = OTHER; note = misc_feature - bicyclic nucleic acid scaffold modification
  modified_base 14: mod_base = OTHER; note = misc_feature - bicyclic nucleic acid scaffold modification
  modified_base 16: mod_base = OTHER; note = misc_feature - bicyclic nucleic acid scaffold modification
  source 1..16: mol_type = other RNA
tatttagcatgttccc

SEQ ID NO: 1836 - RNA, 16 nt, synthetic construct
  modified_base 1: mod_base = OTHER; note = thymine
  misc_feature 1..16: note = Antisense oligonucleotide
  modified_base 1: mod_base = OTHER; note = misc_feature - bicyclic nucleic acid scaffold modification
  modified_base 7..8: mod_base = OTHER; note = misc_feature - bicyclic nucleic acid scaffold modification
  modified_base 11: mod_base = OTHER; note = misc_feature - bicyclic nucleic acid scaffold modification
  modified_base 14..16: mod_base = OTHER; note = misc_feature - bicyclic nucleic acid scaffold modification
  source 1..16: mol_type = other RNA
tatttagcatgttccc

SEQ ID NO: 1837 - RNA, 23 nt, synthetic construct
  misc_feature 1..23: note = Antisense oligonucleotide
  modified_base 1: mod_base = OTHER; note = misc_feature - bicyclic nucleic acid scaffold modification
  modified_base 4: mod_base = OTHER; note = misc_feature - bicyclic nucleic acid scaffold modification
  modified_base 23: mod_base = OTHER; note = misc_feature - bicyclic nucleic acid scaffold modification
  source 1..23: mol_type = other RNA
attctcaggaatttgtgtctttc

SEQ ID NO: 1838 - RNA, 23 nt, synthetic construct
  misc_feature 1..23: note = Antisense oligonucleotide
  modified_base 1: mod_base = OTHER; note = misc_feature - bicyclic nucleic acid scaffold modification
  modified_base 6: mod_base = OTHER; note = misc_feature - bicyclic nucleic acid scaffold modification
  modified_base 23: mod_base = OTHER; note = misc_feature - bicyclic nucleic acid scaffold modification
  source 1..23: mol_type = other RNA
attctcaggaatttgtgtctttc

SEQ ID NO: 1839 - RNA, 23 nt, synthetic construct
  misc_feature 1..23: note = Antisense oligonucleotide
  modified_base 1: mod_base = OTHER; note = misc_feature - bicyclic nucleic acid scaffold modification
  modified_base 8: mod_base = OTHER; note = misc_feature - bicyclic nucleic acid scaffold modification
  modified_base 23: mod_base = OTHER; note = misc_feature - bicyclic nucleic acid scaffold modification
  source 1..23: mol_type = other RNA
attctcaggaatttgtgtctttc

SEQ ID NO: 1840 - RNA, 23 nt, synthetic construct
  misc_feature 1..23: note = Antisense oligonucleotide
  modified_base 1: mod_base = OTHER; note = misc_feature - bicyclic nucleic acid scaffold modification
  modified_base 9: mod_base = OTHER; note = misc_feature - bicyclic nucleic acid scaffold modification
  modified_base 23: mod_base = OTHER; note = misc_feature - bicyclic nucleic acid scaffold modification
  source 1..23: mol_type = other RNA
attctcaggaatttgtgtctttc

SEQ ID NO: 1841 - RNA, 23 nt, synthetic construct
  misc_feature 1..23: note = Antisense oligonucleotide
  modified_base 1: mod_base = OTHER; note = misc_feature - bicyclic nucleic acid scaffold modification
  modified_base 15: mod_base = OTHER; note = misc_feature - bicyclic nucleic acid scaffold modification
  modified_base 23: mod_base = OTHER; note = misc_feature - bicyclic nucleic acid scaffold modification
  source 1..23: mol_type = other RNA
attctcaggaatttgtgtctttc

SEQ ID NO: 1842 - RNA, 23 nt, synthetic construct
  misc_feature 1..23: note = Antisense oligonucleotide
  modified_base 1: mod_base = OTHER; note = misc_feature - bicyclic nucleic acid scaffold modification
  modified_base 17: mod_base = OTHER; note = misc_feature - bicyclic nucleic acid scaffold modification
  modified_base 23: mod_base = OTHER; note = misc_feature - bicyclic nucleic acid scaffold modification
  source 1..23: mol_type = other RNA
attctcaggaatttgtgtctttc

SEQ ID NO: 1843 - RNA, 23 nt, synthetic construct
  misc_feature 1..23: note = Antisense oligonucleotide
  modified_base 1: mod_base = OTHER; note = misc_feature - bicyclic nucleic acid scaffold modification
  modified_base 19: mod_base = OTHER; note = misc_feature - bicyclic nucleic acid scaffold modification
  modified_base 23: mod_base = OTHER; note = misc_feature - bicyclic nucleic acid scaffold modification
  source 1..23: mol_type = other RNA
attctcaggaatttgtgtctttc

SEQ ID NO: 1844 - RNA, 23 nt, synthetic construct
  misc_feature 1..23: note = Antisense oligonucleotide
  modified_base 1: mod_base = OTHER; note = misc_feature - bicyclic nucleic acid scaffold modification
  modified_base 6: mod_base = OTHER; note = misc_feature - bicyclic nucleic acid scaffold modification
  modified_base 19: mod_base = OTHER; note = misc_feature - bicyclic nucleic acid scaffold modification
  modified_base 23: mod_base = OTHER; note = misc_feature - bicyclic nucleic acid scaffold modification
  source 1..23: mol_type = other RNA
attctcaggaatttgtgtctttc

SEQ ID NO: 1845 - RNA, 23 nt, synthetic construct
  misc_feature 1..23: note = Antisense oligonucleotide
  modified_base 1: mod_base = OTHER; note = misc_feature - bicyclic nucleic acid scaffold modification
  modified_base 8: mod_base = OTHER; note = misc_feature - bicyclic nucleic acid scaffold modification
  modified_base 15: mod_base = OTHER; note = misc_feature - bicyclic nucleic acid scaffold modification
  modified_base 23: mod_base = OTHER; note = misc_feature - bicyclic nucleic acid scaffold modification
  source 1..23: mol_type = other RNA
attctcaggaatttgtgtctttc

SEQ ID NO: 1846 - RNA, 23 nt, synthetic construct
  misc_feature 1..23: note = Antisense oligonucleotide
  modified_base 1: mod_base = OTHER; note = misc_feature - bicyclic nucleic acid scaffold modification
  modified_base 9: mod_base = OTHER; note = misc_feature - bicyclic nucleic acid scaffold modification
  modified_base 17: mod_base = OTHER; note = misc_feature - bicyclic nucleic acid scaffold modification
  modified_base 23: mod_base = OTHER; note = misc_feature - bicyclic nucleic acid scaffold modification
  source 1..23: mol_type = other RNA
attctcaggaatttgtgtctttc

SEQ ID NO: 1847 - RNA, 23 nt, synthetic construct
  misc_feature 1..23: note = Antisense oligonucleotide
  modified_base 1: mod_base = OTHER; note = misc_feature - bicyclic nucleic acid scaffold modification
  modified_base 4: mod_base = OTHER; note = misc_feature - bicyclic nucleic acid scaffold modification
  modified_base 9: mod_base = OTHER; note = misc_feature - bicyclic nucleic acid scaffold modification
  modified_base 15: mod_base = OTHER; note = misc_feature - bicyclic nucleic acid scaffold modification
  modified_base 19: mod_base = OTHER; note = misc_feature - bicyclic nucleic acid scaffold modification
  modified_base 23: mod_base = OTHER; note = misc_feature - bicyclic nucleic acid scaffold modification
  source 1..23: mol_type = other RNA
attctcaggaatttgtgtctttc

SEQ ID NO: 1848 - RNA, 20 nt, synthetic construct
  modified_base 20: mod_base = OTHER; note = thymine
  misc_feature 1..20: note = Antisense oligonucleotide
  modified_base 1: mod_base = OTHER; note = misc_feature - bicyclic nucleic acid scaffold modification
  modified_base 20: mod_base = OTHER; note = misc_feature - bicyclic nucleic acid scaffold modification
  source 1..20: mol_type = other RNA
attctcaggaatttgtgtct

SEQ ID NO: 1849 - RNA, 20 nt, synthetic construct
  modified_base 20: mod_base = OTHER; note = thymine
  misc_feature 1..20: note = Antisense oligonucleotide
  modified_base 1: mod_base = OTHER; note = misc_feature - bicyclic nucleic acid scaffold modification
  modified_base 4: mod_base = OTHER; note = misc_feature - bicyclic nucleic acid scaffold modification
  modified_base 20: mod_base = OTHER; note = misc_feature - bicyclic nucleic acid scaffold modification
  source 1..20: mol_type = other RNA
attctcaggaatttgtgtct

SEQ ID NO: 1850 - RNA, 20 nt, synthetic construct
  modified_base 20: mod_base = OTHER; note = thymine
  misc_feature 1..20: note = Antisense oligonucleotide
  modified_base 1: mod_base = OTHER; note = misc_feature - bicyclic nucleic acid scaffold modification
  modified_base 6: mod_base = OTHER; note = misc_feature - bicyclic nucleic acid scaffold modification
  modified_base 20: mod_base = OTHER; note = misc_feature - bicyclic nucleic acid scaffold modification
  source 1..20: mol_type = other RNA
attctcaggaatttgtgtct

SEQ ID NO: 1851 - RNA, 20 nt, synthetic construct
  modified_base 20: mod_base = OTHER; note = thymine
  misc_feature 1..20: note = Antisense oligonucleotide
  modified_base 1: mod_base = OTHER; note = misc_feature - bicyclic nucleic acid scaffold modification
  modified_base 9: mod_base = OTHER; note = misc_feature - bicyclic nucleic acid scaffold modification
  modified_base 20: mod_base = OTHER; note = misc_feature - bicyclic nucleic acid scaffold modification
  source 1..20: mol_type = other RNA
attctcaggaatttgtgtct

SEQ ID NO: 1852 - RNA, 20 nt, synthetic construct
  modified_base 20: mod_base = OTHER; note = thymine
  misc_feature 1..20: note = Antisense oligonucleotide
  modified_base 1: mod_base = OTHER; note = misc_feature - bicyclic nucleic acid scaffold modification
  modified_base 15: mod_base = OTHER; note = misc_feature - bicyclic nucleic acid scaffold modification
  modified_base 20: mod_base = OTHER; note = misc_feature - bicyclic nucleic acid scaffold modification
  source 1..20: mol_type = other RNA
attctcaggaatttgtgtct

SEQ ID NO: 1853 - RNA, 20 nt, synthetic construct
  modified_base 20: mod_base = OTHER; note = thymine
  misc_feature 1..20: note = Antisense oligonucleotide
  modified_base 1: mod_base = OTHER; note = misc_feature - bicyclic nucleic acid scaffold modification
  modified_base 17: mod_base = OTHER; note = misc_feature - bicyclic nucleic acid scaffold modification
  modified_base 20: mod_base = OTHER; note = misc_feature - bicyclic nucleic acid scaffold modification
  source 1..20: mol_type = other RNA
attctcaggaatttgtgtct

SEQ ID NO: 1854 - RNA, 20 nt, synthetic construct
  modified_base 20: mod_base = OTHER; note = thymine
  misc_feature 1..20: note = Antisense oligonucleotide
  modified_base 1: mod_base = OTHER; note = misc_feature - bicyclic nucleic acid scaffold modification
  modified_base 8: mod_base = OTHER; note = misc_feature - bicyclic nucleic acid scaffold modification
  modified_base 17: mod_base = OTHER; note = misc_feature - bicyclic nucleic acid scaffold modification
  modified_base 20: mod_base = OTHER; note = misc_feature - bicyclic nucleic acid scaffold modification
  source 1..20: mol_type = other RNA
attctcaggaatttgtgtct

SEQ ID NO: 1855 - RNA, 20 nt, synthetic construct
  modified_base 20: mod_base = OTHER; note = thymine
  misc_feature 1..20: note = Antisense oligonucleotide
  modified_base 1: mod_base = OTHER; note = misc_feature - bicyclic nucleic acid scaffold modification
  modified_base 4: mod_base = OTHER; note = misc_feature - bicyclic nucleic acid scaffold modification
  modified_base 15: mod_base = OTHER; note = misc_feature - bicyclic nucleic acid scaffold modification
  modified_base 20: mod_base = OTHER; note = misc_feature - bicyclic nucleic acid scaffold modification
  source 1..20: mol_type = other RNA
attctcaggaatttgtgtct

SEQ ID NO: 1856 - RNA, 20 nt, synthetic construct
  modified_base 20: mod_base = OTHER; note = thymine
  misc_feature 1..20: note = Antisense oligonucleotide
  modified_base 1: mod_base = OTHER; note = misc_feature - bicyclic nucleic acid scaffold modification
  modified_base 4: mod_base = OTHER; note = misc_feature - bicyclic nucleic acid scaffold modification
  modified_base 6: mod_base = OTHER; note = misc_feature - bicyclic nucleic acid scaffold modification
  modified_base 20: mod_base = OTHER; note = misc_feature - bicyclic nucleic acid scaffold modification
  source 1..20: mol_type = other RNA
attctcaggaatttgtgtct

SEQ ID NO: 1857 - RNA, 20 nt, synthetic construct
  modified_base 20: mod_base = OTHER; note = thymine
  misc_feature 1..20: note = Antisense oligonucleotide
  modified_base 1: mod_base = OTHER; note = misc_feature - bicyclic nucleic acid scaffold modification
  modified_base 4: mod_base = OTHER; note = misc_feature - bicyclic nucleic acid scaffold modification
  modified_base 6: mod_base = OTHER; note = misc_feature - bicyclic nucleic acid scaffold modification
  modified_base 19..20: mod_base = OTHER; note = misc_feature - bicyclic nucleic acid scaffold modification
  source 1..20: mol_type = other RNA
attctcaggaatttgtgtct

SEQ ID NO: 1858 - RNA, 20 nt, synthetic construct
  modified_base 20: mod_base = OTHER; note = thymine
  misc_feature 1..20: note = Antisense oligonucleotide
  modified_base 1: mod_base = OTHER; note = misc_feature - bicyclic nucleic acid scaffold modification
  modified_base 9: mod_base = OTHER; note = misc_feature - bicyclic nucleic acid scaffold modification
  modified_base 15: mod_base = OTHER; note = misc_feature - bicyclic nucleic acid scaffold modification
  modified_base 17: mod_base = OTHER; note = misc_feature - bicyclic nucleic acid scaffold modification
  modified_base 20: mod_base = OTHER; note = misc_feature - bicyclic nucleic acid scaffold modification
  source 1..20: mol_type = other RNA
attctcaggaatttgtgtct

SEQ ID NO: 1859 - RNA, 20 nt, synthetic construct
  modified_base 2: mod_base = OTHER; note = thymine
  modified_base 20: mod_base = OTHER; note = thymine
  misc_feature 1..20: note = Antisense oligonucleotide
  modified_base 1..2: mod_base = OTHER; note = misc_feature - bicyclic nucleic acid scaffold modification
  modified_base 8: mod_base = OTHER; note = misc_feature - bicyclic nucleic acid scaffold modification
  modified_base 15: mod_base = OTHER; note = misc_feature - bicyclic nucleic acid scaffold modification
  modified_base 19..20: mod_base = OTHER; note = misc_feature - bicyclic nucleic acid scaffold modification
  source 1..20: mol_type = other RNA
attctcaggaatttgtgtct

SEQ ID NO: 1860 - RNA, 20 nt, synthetic construct
  modified_base 1: mod_base = OTHER; note = thymine
  modified_base 20: mod_base = OTHER; note = thymine
  misc_feature 1..20: note = Antisense oligonucleotide
  modified_base 1: mod_base = OTHER; note = misc_feature - bicyclic nucleic acid scaffold modification
  modified_base 20: mod_base = OTHER; note = misc_feature - bicyclic nucleic acid scaffold modification
  source 1..20: mol_type = other RNA
ttctcaggaatttgtgtctt

SEQ ID NO: 1861 - RNA, 20 nt, synthetic construct
  modified_base 1: mod_base = OTHER; note = thymine
  modified_base 20: mod_base = OTHER; note = thymine
  misc_feature 1..20: note = Antisense oligonucleotide
  modified_base 1: mod_base = OTHER; note = misc_feature - bicyclic nucleic acid scaffold modification
  modified_base 3: mod_base = OTHER; note = misc_feature - bicyclic nucleic acid scaffold modification
  modified_base 20: mod_base = OTHER; note = misc_feature - bicyclic nucleic acid scaffold modification
  source 1..20: mol_type = other RNA
ttctcaggaatttgtgtctt

SEQ ID NO: 1862 - RNA, 20 nt, synthetic construct
  modified_base 1: mod_base = OTHER; note = thymine
  modified_base 20: mod_base = OTHER; note = thymine
  misc_feature 1..20: note = Antisense oligonucleotide
  modified_base 1: mod_base = OTHER; note = misc_feature - bicyclic nucleic acid scaffold modification
  modified_base 5: mod_base = OTHER; note = misc_feature - bicyclic nucleic acid scaffold modification
  modified_base 20: mod_base = OTHER; note = misc_feature - bicyclic nucleic acid scaffold modification
  source 1..20: mol_type = other RNA
ttctcaggaatttgtgtctt

SEQ ID NO: 1863 - RNA, 20 nt, synthetic construct
  modified_base 1: mod_base = OTHER; note = thymine
  modified_base 20: mod_base = OTHER; note = thymine
  misc_feature 1..20: note = Antisense oligonucleotide
  modified_base 1: mod_base = OTHER; note = misc_feature - bicyclic nucleic acid scaffold modification
  modified_base 7: mod_base = OTHER; note = misc_feature - bicyclic nucleic acid scaffold modification
  modified_base 20: mod_base = OTHER; note = misc_feature - bicyclic nucleic acid scaffold modification
  source 1..20: mol_type = other RNA
ttctcaggaatttgtgtctt

SEQ ID NO: 1864 - RNA, 20 nt, synthetic construct
  modified_base 1: mod_base = OTHER; note = thymine
  modified_base 20: mod_base = OTHER; note = thymine
  misc_feature 1..20: note = Antisense oligonucleotide
  modified_base 1: mod_base = OTHER; note = misc_feature - bicyclic nucleic acid scaffold modification
  modified_base 8: mod_base = OTHER; note = misc_feature - bicyclic nucleic acid scaffold modification
  modified_base 20: mod_base = OTHER; note = misc_feature - bicyclic nucleic acid scaffold modification
  source 1..20: mol_type = other RNA
ttctcaggaatttgtgtctt

SEQ ID NO: 1865 - RNA, 20 nt, synthetic construct
  modified_base 1: mod_base = OTHER; note = thymine
  modified_base 20: mod_base = OTHER; note = thymine
  misc_feature 1..20: note = Antisense oligonucleotide
  modified_base 1: mod_base = OTHER; note = misc_feature - bicyclic nucleic acid scaffold modification
  modified_base 14: mod_base = OTHER; note = misc_feature - bicyclic nucleic acid scaffold modification
  modified_base 20: mod_base = OTHER; note = misc_feature - bicyclic nucleic acid scaffold modification
  source 1..20: mol_type = other RNA
ttctcaggaatttgtgtctt

SEQ ID NO: 1866 - RNA, 20 nt, synthetic construct
  modified_base 1: mod_base = OTHER; note = thymine
  modified_base 20: mod_base = OTHER; note = thymine
  misc_feature 1..20: note = Antisense oligonucleotide
  modified_base 1: mod_base = OTHER; note = misc_feature - bicyclic nucleic acid scaffold modification
  modified_base 16: mod_base = OTHER; note = misc_feature - bicyclic nucleic acid scaffold modification
  modified_base 20: mod_base = OTHER; note = misc_feature - bicyclic nucleic acid scaffold modification
  source 1..20: mol_type = other RNA
ttctcaggaatttgtgtctt

SEQ ID NO: 1867 - RNA, 20 nt, synthetic construct
  modified_base 1: mod_base = OTHER; note = thymine
  modified_base 20: mod_base = OTHER; note = thymine
  misc_feature 1..20: note = Antisense oligonucleotide
  modified_base 1: mod_base = OTHER; note = misc_feature - bicyclic nucleic acid scaffold modification
  modified_base 18: mod_base = OTHER; note = misc_feature - bicyclic nucleic acid scaffold modification
  modified_base 20: mod_base = OTHER; note = misc_feature - bicyclic nucleic acid scaffold modification
  source 1..20: mol_type = other RNA
ttctcaggaatttgtgtctt

SEQ ID NO: 1868 - RNA, 20 nt, synthetic construct
  modified_base 1: mod_base = OTHER; note = thymine
  modified_base 20: mod_base = OTHER; note = thymine
  misc_feature 1..20: note = Antisense oligonucleotide
  modified_base 1: mod_base = OTHER; note = misc_feature - bicyclic nucleic acid scaffold modification
  modified_base 3: mod_base = OTHER; note = misc_feature - bicyclic nucleic acid scaffold modification
  modified_base 5: mod_base = OTHER; note = misc_feature - bicyclic nucleic acid scaffold modification
  modified_base 20: mod_base = OTHER; note = misc_feature - bicyclic nucleic acid scaffold modification
  source 1..20: mol_type = other RNA
ttctcaggaatttgtgtctt

SEQ ID NO: 1869 - RNA, 20 nt, synthetic construct
  modified_base 1: mod_base = OTHER; note = thymine
  modified_base 20: mod_base = OTHER; note = thymine
  misc_feature 1..20: note = Antisense oligonucleotide
  modified_base 1: mod_base = OTHER; note = misc_feature - bicyclic nucleic acid scaffold modification
  modified_base 3: mod_base = OTHER; note = misc_feature - bicyclic nucleic acid scaffold modification
  modified_base 5: mod_base = OTHER; note = misc_feature - bicyclic nucleic acid scaffold modification
  modified_base 18: mod_base = OTHER; note = misc_feature - bicyclic nucleic acid scaffold modification
  modified_base 20: mod_base = OTHER; note = misc_feature - bicyclic nucleic acid scaffold modification
  source 1..20: mol_type = other RNA
ttctcaggaatttgtgtctt

SEQ ID NO: 1870 - RNA, 20 nt, synthetic construct
  modified_base 1: mod_base = OTHER; note = thymine
  modified_base 20: mod_base = OTHER; note = thymine
  misc_feature 1..20: note = Antisense oligonucleotide
  modified_base 1: mod_base = OTHER; note = misc_feature - bicyclic nucleic acid scaffold modification
  modified_base 7: mod_base = OTHER; note = misc_feature - bicyclic nucleic acid scaffold modification
  modified_base 16: mod_base = OTHER; note = misc_feature - bicyclic nucleic acid scaffold modification
  modified_base 20: mod_base = OTHER; note = misc_feature - bicyclic nucleic acid scaffold modification
  source 1..20: mol_type = other RNA
ttctcaggaatttgtgtctt

SEQ ID NO: 1871 - RNA, 20 nt, synthetic construct
  modified_base 1: mod_base = OTHER; note = thymine
  modified_base 20: mod_base = OTHER; note = thymine
  misc_feature 1..20: note = Antisense oligonucleotide
  modified_base 1: mod_base = OTHER; note = misc_feature - bicyclic nucleic acid scaffold modification
  modified_base 7: mod_base = OTHER; note = misc_feature - bicyclic nucleic acid scaffold modification
  modified_base 14: mod_base = OTHER; note = misc_feature - bicyclic nucleic acid scaffold modification
  modified_base 16: mod_base = OTHER; note = misc_feature - bicyclic nucleic acid scaffold modification
  modified_base 20: mod_base = OTHER; note = misc_feature - bicyclic nucleic acid scaffold modification
  source 1..20: mol_type = other RNA
ttctcaggaatttgtgtctt

SEQ ID NO: 1872 - RNA, 20 nt, synthetic construct
  modified_base 1: mod_base = OTHER; note = thymine
  modified_base 20: mod_base = OTHER; note = thymine
  misc_feature 1..20: note = Antisense oligonucleotide
  modified_base 1: mod_base = OTHER; note = misc_feature - bicyclic nucleic acid scaffold modification
  modified_base 3: mod_base = OTHER; note = misc_feature - bicyclic nucleic acid scaffold modification
  modified_base 8: mod_base = OTHER; note = misc_feature - bicyclic nucleic acid scaffold modification
  modified_base 14: mod_base = OTHER; note = misc_feature - bicyclic nucleic acid scaffold modification
  modified_base 18: mod_base = OTHER; note = misc_feature - bicyclic nucleic acid scaffold modification
  modified_base 20: mod_base = OTHER; note = misc_feature - bicyclic nucleic acid scaffold modification
  source 1..20: mol_type = other RNA
ttctcaggaatttgtgtctt

SEQ ID NO: 1873 - RNA, 20 nt, synthetic construct
  modified_base 1: mod_base = OTHER; note = thymine
  modified_base 20: mod_base = OTHER; note = thymine
  misc_feature 1..20: note = Antisense oligonucleotide
  modified_base 1: mod_base = OTHER; note = misc_feature - bicyclic nucleic acid scaffold modification
  modified_base 20: mod_base = OTHER; note = misc_feature - bicyclic nucleic acid scaffold modification
  source 1..20: mol_type = other RNA
tctcaggaatttgtgtcttt

SEQ ID NO: 1874 - RNA, 20 nt, synthetic construct
  modified_base 1: mod_base = OTHER; note = thymine
  modified_base 20: mod_base = OTHER; note = thymine
  misc_feature 1..20: note = Antisense oligonucleotide
  modified_base 1: mod_base = OTHER; note = misc_feature - bicyclic nucleic acid scaffold modification
  modified_base 4: mod_base = OTHER; note = misc_feature - bicyclic nucleic acid scaffold modification
  modified_base 20: mod_base = OTHER; note = misc_feature - bicyclic nucleic acid scaffold modification
  source 1..20: mol_type = other RNA
tctcaggaatttgtgtcttt

SEQ ID NO: 1875 - RNA, 20 nt, synthetic construct
  modified_base 1: mod_base = OTHER; note = thymine
  modified_base 20: mod_base = OTHER; note = thymine
  misc_feature 1..20: note = Antisense oligonucleotide
  modified_base 1: mod_base = OTHER; note = misc_feature - bicyclic nucleic acid scaffold modification
  modified_base 6: mod_base = OTHER; note = misc_feature - bicyclic nucleic acid scaffold modification
  modified_base 20: mod_base = OTHER; note = misc_feature - bicyclic nucleic acid scaffold modification
  source 1..20: mol_type = other RNA
tctcaggaatttgtgtcttt

SEQ ID NO: 1876 - RNA, 20 nt, synthetic construct
  modified_base 1: mod_base = OTHER; note = thymine
  modified_base 20: mod_base = OTHER; note = thymine
  misc_feature 1..20: note = Antisense oligonucleotide
  modified_base 1: mod_base = OTHER; note = misc_feature - bicyclic nucleic acid scaffold modification
  modified_base 7: mod_base = OTHER; note = misc_feature - bicyclic nucleic acid scaffold modification
  modified_base 20: mod_base = OTHER; note = misc_feature - bicyclic nucleic acid scaffold modification
  source 1..20: mol_type = other RNA
tctcaggaatttgtgtcttt

SEQ ID NO: 1877 - RNA, 20 nt, synthetic construct
  modified_base 1: mod_base = OTHER; note = thymine
  modified_base 20: mod_base = OTHER; note = thymine
  misc_feature 1..20: note = Antisense oligonucleotide
  modified_base 1: mod_base = OTHER; note = misc_feature - bicyclic nucleic acid scaffold modification
  modified_base 13: mod_base = OTHER; note = misc_feature - bicyclic nucleic acid scaffold modification
  modified_base 20: mod_base = OTHER; note = misc_feature - bicyclic nucleic acid scaffold modification
  source 1..20: mol_type = other RNA
tctcaggaatttgtgtcttt

SEQ ID NO: 1878 - RNA, 20 nt, synthetic construct
  modified_base 1: mod_base = OTHER; note = thymine
  modified_base 20: mod_base = OTHER; note = thymine
  misc_feature 1..20: note = Antisense oligonucleotide
  modified_base 1: mod_base = OTHER; note = misc_feature - bicyclic nucleic acid scaffold modification
  modified_base 15: mod_base = OTHER; note = misc_feature - bicyclic nucleic acid scaffold modification
  modified_base 20: mod_base = OTHER; note = misc_feature - bicyclic nucleic acid scaffold modification
  source 1..20: mol_type = other RNA
tctcaggaatttgtgtcttt

SEQ ID NO: 1879 - RNA, 20 nt, synthetic construct
  modified_base 1: mod_base = OTHER; note = thymine
  modified_base 20: mod_base = OTHER; note = thymine
  misc_feature 1..20: note = Antisense oligonucleotide
  modified_base 1: mod_base = OTHER; note = misc_feature - bicyclic nucleic acid scaffold modification
  modified_base 17: mod_base = OTHER; note = misc_feature - bicyclic nucleic acid scaffold modification
  modified_base 20: mod_base = OTHER; note = misc_feature - bicyclic nucleic acid scaffold modification
  source 1..20: mol_type = other RNA
tctcaggaatttgtgtcttt

SEQ ID NO: 1880 - RNA, 20 nt, synthetic construct
  modified_base 1: mod_base = OTHER; note = thymine
  modified_base 20: mod_base = OTHER; note = thymine
  misc_feature 1..20: note = Antisense oligonucleotide
  modified_base 1: mod_base = OTHER; note = misc_feature - bicyclic nucleic acid scaffold modification
  modified_base 4: mod_base = OTHER; note = misc_feature - bicyclic nucleic acid scaffold modification
  modified_base 17: mod_base = OTHER; note = misc_feature - bicyclic nucleic acid scaffold modification
  modified_base 20: mod_base = OTHER; note = misc_feature - bicyclic nucleic acid scaffold modification
  source 1..20: mol_type = other RNA
tctcaggaatttgtgtcttt

SEQ ID NO: 1881 - RNA, 20 nt, synthetic construct
  modified_base 1: mod_base = OTHER; note = thymine
  modified_base 20: mod_base = OTHER; note = thymine
  misc_feature 1..20: note = Antisense oligonucleotide
  modified_base 1: mod_base = OTHER; note = misc_feature - bicyclic nucleic acid scaffold modification
  modified_base 6: mod_base = OTHER; note = misc_feature - bicyclic nucleic acid scaffold modification
  modified_base 15: mod_base = OTHER; note = misc_feature - bicyclic nucleic acid scaffold modification
  modified_base 20: mod_base = OTHER; note = misc_feature - bicyclic nucleic acid scaffold modification
  source 1..20: mol_type = other RNA
tctcaggaatttgtgtcttt

SEQ ID NO: 1882 - RNA, 20 nt, synthetic construct
  modified_base 1: mod_base = OTHER; note = thymine
  modified_base 20: mod_base = OTHER; note = thymine
  misc_feature 1..20: note = Antisense oligonucleotide
  modified_base 1: mod_base = OTHER; note = misc_feature - bicyclic nucleic acid scaffold modification
  modified_base 7: mod_base = OTHER; note = misc_feature - bicyclic nucleic acid scaffold modification
  modified_base 13: mod_base = OTHER; note = misc_feature - bicyclic nucleic acid scaffold modification
  modified_base 20: mod_base = OTHER; note = misc_feature - bicyclic nucleic acid scaffold modification
  source 1..20: mol_type = other RNA
tctcaggaatttgtgtcttt

SEQ ID NO: 1883 - RNA, 20 nt, synthetic construct
  modified_base 1: mod_base = OTHER; note = thymine
  modified_base 19..20: mod_base = OTHER; note = thymine
  misc_feature 1..20: note = Antisense oligonucleotide
  modified_base 1..2: mod_base = OTHER; note = misc_feature - bicyclic nucleic acid scaffold modification
  modified_base 19..20: mod_base = OTHER; note = misc_feature - bicyclic nucleic acid scaffold modification
  source 1..20: mol_type = other RNA
tctcaggaatttgtgtcttt

SEQ ID NO: 1884 - RNA, 20 nt, synthetic construct
  modified_base 1: mod_base = OTHER; note = thymine
  modified_base 20: mod_base = OTHER; note = thymine
  misc_feature 1..20: note = Antisense oligonucleotide
  modified_base 1..2: mod_base = OTHER; note = misc_feature - bicyclic nucleic acid scaffold modification
  modified_base 4: mod_base = OTHER; note = misc_feature - bicyclic nucleic acid scaffold modification
  modified_base 17: mod_base = OTHER; note = misc_feature - bicyclic nucleic acid scaffold modification
  modified_base 20: mod_base = OTHER; note = misc_feature - bicyclic nucleic acid scaffold modification
  source 1..20: mol_type = other RNA
tctcaggaatttgtgtcttt

SEQ ID NO: 1885 - RNA, 20 nt, synthetic construct
  modified_base 1: mod_base = OTHER; note = thymine
  modified_base 20: mod_base = OTHER; note = thymine
  misc_feature 1..20: note = Antisense oligonucleotide
  modified_base 1: mod_base = OTHER; note = misc_feature - bicyclic nucleic acid scaffold modification
  modified_base 6..7: mod_base = OTHER; note = misc_feature - bicyclic nucleic acid scaffold modification
  modified_base 13: mod_base = OTHER; note = misc_feature - bicyclic nucleic acid scaffold modification
  modified_base 15: mod_base = OTHER; note = misc_feature - bicyclic nucleic acid scaffold modification
  modified_base 20: mod_base = OTHER; note = misc_feature - bicyclic nucleic acid scaffold modification
  source 1..20: mol_type = other RNA
tctcaggaatttgtgtcttt

SEQ ID NO: 1886 - RNA, 20 nt, synthetic construct
  misc_feature 1..20: note = Antisense oligonucleotide
  modified_base 1: mod_base = OTHER; note = misc_feature - bicyclic nucleic acid scaffold modification
  modified_base 20: mod_base = OTHER; note = misc_feature - bicyclic nucleic acid scaffold modification
  source 1..20: mol_type = other RNA
ctcaggaatttgtgtctttc

SEQ ID NO: 1887 - RNA, 20 nt, synthetic construct
  misc_feature 1..20: note = Antisense oligonucleotide
  modified_base 1: mod_base = OTHER; note = misc_feature - bicyclic nucleic acid scaffold modification
  modified_base 3: mod_base = OTHER; note = misc_feature - bicyclic nucleic acid scaffold modification
  modified_base 20: mod_base = OTHER; note = misc_feature - bicyclic nucleic acid scaffold modification
  source 1..20: mol_type = other RNA
ctcaggaatttgtgtctttc

SEQ ID NO: 1888 - RNA, 20 nt, synthetic construct
  misc_feature 1..20: note = Antisense oligonucleotide
  modified_base 1: mod_base = OTHER; note = misc_feature - bicyclic nucleic acid scaffold modification
  modified_base 5: mod_base = OTHER; note = misc_feature - bicyclic nucleic acid scaffold modification
  modified_base 20: mod_base = OTHER; note = misc_feature - bicyclic nucleic acid scaffold modification
  source 1..20: mol_type = other RNA
ctcaggaatttgtgtctttc

SEQ ID NO: 1889 - RNA, 20 nt, synthetic construct
  misc_feature 1..20: note = Antisense oligonucleotide
  modified_base 1: mod_base = OTHER; note = misc_feature - bicyclic nucleic acid scaffold modification
  modified_base 6: mod_base = OTHER; note = misc_feature - bicyclic nucleic acid scaffold modification
  modified_base 20: mod_base = OTHER; note = misc_feature - bicyclic nucleic acid scaffold modification
  source 1..20: mol_type = other RNA
ctcaggaatttgtgtctttc

SEQ ID NO: 1890 - RNA, 20 nt, synthetic construct
  misc_feature 1..20: note = Antisense oligonucleotide
  modified_base 1: mod_base = OTHER; note = misc_feature - bicyclic nucleic acid scaffold modification
  modified_base 12: mod_base = OTHER; note = misc_feature - bicyclic nucleic acid scaffold modification
  modified_base 20: mod_base = OTHER; note = misc_feature - bicyclic nucleic acid scaffold modification
  source 1..20: mol_type = other RNA
ctcaggaatttgtgtctttc

SEQ ID NO: 1891 - RNA, 20 nt, synthetic construct
  misc_feature 1..20: note = Antisense oligonucleotide
  modified_base 1: mod_base = OTHER; note = misc_feature - bicyclic nucleic acid scaffold modification
  modified_base 14: mod_base = OTHER; note = misc_feature - bicyclic nucleic acid scaffold modification
  modified_base 20: mod_base = OTHER; note = misc_feature - bicyclic nucleic acid scaffold modification
  source 1..20: mol_type = other RNA
ctcaggaatttgtgtctttc

SEQ ID NO: 1892 - RNA, 20 nt, synthetic construct
  misc_feature 1..20: note = Antisense oligonucleotide
  modified_base 1: mod_base = OTHER; note = misc_feature - bicyclic nucleic acid scaffold modification
  modified_base 16: mod_base = OTHER; note = misc_feature - bicyclic nucleic acid scaffold modification
  modified_base 20: mod_base = OTHER; note = misc_feature - bicyclic nucleic acid scaffold modification
  source 1..20: mol_type = other RNA
ctcaggaatttgtgtctttc

SEQ ID NO: 1893 - RNA, 20 nt, synthetic construct
  misc_feature 1..20: note = Antisense oligonucleotide
  modified_base 1: mod_base = OTHER; note = misc_feature - bicyclic nucleic acid scaffold modification
  modified_base 3: mod_base = OTHER; note = misc_feature - bicyclic nucleic acid scaffold modification
  modified_base 16: mod_base = OTHER; note = misc_feature - bicyclic nucleic acid scaffold modification
  modified_base 20: mod_base = OTHER; note = misc_feature - bicyclic nucleic acid scaffold modification
  source 1..20: mol_type = other RNA
ctcaggaatttgtgtctttc

SEQ ID NO: 1894 - RNA, 20 nt, synthetic construct
  misc_feature 1..20: note = Antisense oligonucleotide
  modified_base 1: mod_base = OTHER; note = misc_feature - bicyclic nucleic acid scaffold modification
  modified_base 3: mod_base = OTHER; note = misc_feature - bicyclic nucleic acid scaffold modification
  modified_base 12: mod_base = OTHER; note = misc_feature - bicyclic nucleic acid scaffold modification
  modified_base 16: mod_base = OTHER; note = misc_feature - bicyclic nucleic acid scaffold modification
  modified_base 20: mod_base = OTHER; note = misc_feature - bicyclic nucleic acid scaffold modification
  source 1..20: mol_type = other RNA
ctcaggaatttgtgtctttc

SEQ ID NO: 1895 - RNA, 20 nt, synthetic construct
  misc_feature 1..20: note = Antisense oligonucleotide
  modified_base 1: mod_base = OTHER; note = misc_feature - bicyclic nucleic acid scaffold modification
  modified_base 12: mod_base = OTHER; note = misc_feature - bicyclic nucleic acid scaffold modification
  modified_base 14: mod_base = OTHER; note = misc_feature - bicyclic nucleic acid scaffold modification
  modified_base 20: mod_base = OTHER; note = misc_feature - bicyclic nucleic acid scaffold modification
  source 1..20: mol_type = other RNA
ctcaggaatttgtgtctttc

SEQ ID NO: 1896 - RNA, 20 nt, synthetic construct
  misc_feature 1..20: note = Antisense oligonucleotide
  modified_base 1: mod_base = OTHER; note = misc_feature - bicyclic nucleic acid scaffold modification
  modified_base 6: mod_base = OTHER; note = misc_feature - bicyclic nucleic acid scaffold modification
  modified_base 12: mod_base = OTHER; note = misc_feature - bicyclic nucleic acid scaffold modification
  modified_base 14: mod_base = OTHER; note = misc_feature - bicyclic nucleic acid scaffold modification
  modified_base 20: mod_base = OTHER; note = misc_feature - bicyclic nucleic acid scaffold modification
  source 1..20: mol_type = other RNA
ctcaggaatttgtgtctttc

SEQ ID NO: 1897 - RNA, 20 nt, synthetic construct
  misc_feature 1..20: note = Antisense oligonucleotide
  modified_base 1: mod_base = OTHER; note = misc_feature - bicyclic nucleic acid scaffold modification
  modified_base 5: mod_base = OTHER; note = misc_feature - bicyclic nucleic acid scaffold modification
  modified_base 14: mod_base = OTHER; note = misc_feature - bicyclic nucleic acid scaffold modification
  modified_base 20: mod_base = OTHER; note = misc_feature - bicyclic nucleic acid scaffold modification
  source 1..20: mol_type = other RNA
ctcaggaatttgtgtctttc

SEQ ID NO: 1898 - RNA, 20 nt, synthetic construct
  modified_base 2: mod_base = OTHER; note = thymine
  modified_base 19: mod_base = OTHER; note = thymine
  misc_feature 1..20: note = Antisense oligonucleotide
  modified_base 1..2: mod_base = OTHER; note = misc_feature - bicyclic nucleic acid scaffold modification
  modified_base 12: mod_base = OTHER; note = misc_feature - bicyclic nucleic acid scaffold modification
  modified_base 19..20: mod_base = OTHER; note = misc_feature - bicyclic nucleic acid scaffold modification
  source 1..20: mol_type = other RNA
ctcaggaatttgtgtctttc

SEQ ID NO: 1899 - RNA, 18 nt, synthetic construct
  modified_base 18: mod_base = OTHER; note = thymine
  misc_feature 1..18: note = Antisense oligonucleotide
  modified_base 1: mod_base = OTHER; note = misc_feature - bicyclic nucleic acid scaffold modification
  modified_base 18: mod_base = OTHER; note = misc_feature - bicyclic nucleic acid scaffold modification
  source 1..18: mol_type = other RNA
attctcaggaatttgtgt

SEQ ID NO: 1900 - RNA, 18 nt, synthetic construct
  modified_base 18: mod_base = OTHER; note = thymine
  misc_feature 1..18: note = Antisense oligonucleotide
  modified_base 1: mod_base = OTHER; note = misc_feature - bicyclic nucleic acid scaffold modification
  modified_base 15: mod_base = OTHER; note = misc_feature - bicyclic nucleic acid scaffold modification
  modified_base 18: mod_base = OTHER; note = misc_feature - bicyclic nucleic acid scaffold modification
  source 1..18: mol_type = other RNA
attctcaggaatttgtgt

SEQ ID NO: 1901 - RNA, 18 nt, synthetic construct
  modified_base 18: mod_base = OTHER; note = thymine
  misc_feature 1..18: note = Antisense oligonucleotide
  modified_base 1: mod_base = OTHER; note = misc_feature - bicyclic nucleic acid scaffold modification
  modified_base 9: mod_base = OTHER; note = misc_feature - bicyclic nucleic acid scaffold modification
  modified_base 18: mod_base = OTHER; note = misc_feature - bicyclic nucleic acid scaffold modification
  source 1..18: mol_type = other RNA
attctcaggaatttgtgt

SEQ ID NO: 1902 - RNA, 18 nt, synthetic construct
  modified_base 18: mod_base = OTHER; note = thymine
  misc_feature 1..18: note = Antisense oligonucleotide
  modified_base 1: mod_base = OTHER; note = misc_feature - bicyclic nucleic acid scaffold modification
  modified_base 8: mod_base = OTHER; note = misc_feature - bicyclic nucleic acid scaffold modification
  modified_base 18: mod_base = OTHER; note = misc_feature - bicyclic nucleic acid scaffold modification
  source 1..18: mol_type = other RNA
attctcaggaatttgtgt

SEQ ID NO: 1903 - RNA, 18 nt, synthetic construct
  modified_base 18: mod_base = OTHER; note = thymine
  misc_feature 1..18: note = Antisense oligonucleotide
  modified_base 1: mod_base = OTHER; note = misc_feature - bicyclic nucleic acid scaffold modification
  modified_base 6: mod_base = OTHER; note = misc_feature - bicyclic nucleic acid scaffold modification
  modified_base 18: mod_base = OTHER; note = misc_feature - bicyclic nucleic acid scaffold modification
  source 1..18: mol_type = other RNA
attctcaggaatttgtgt

SEQ ID NO: 1904 - RNA, 18 nt, synthetic construct
  modified_base 18: mod_base = OTHER; note = thymine
  misc_feature 1..18: note = Antisense oligonucleotide
  modified_base 1: mod_base = OTHER; note = misc_feature - bicyclic nucleic acid scaffold modification
  modified_base 4: mod_base = OTHER; note = misc_feature - bicyclic nucleic acid scaffold modification
  modified_base 18: mod_base = OTHER; note = misc_feature - bicyclic nucleic acid scaffold modification
  source 1..18: mol_type = other RNA
attctcaggaatttgtgt

SEQ ID NO: 1905 - RNA, 18 nt, synthetic construct
  modified_base 18: mod_base = OTHER; note = thymine
  misc_feature 1..18: note = Antisense oligonucleotide
  modified_base 1: mod_base = OTHER; note = misc_feature - bicyclic nucleic acid scaffold modification
  modified_base 4: mod_base = OTHER; note = misc_feature - bicyclic nucleic acid scaffold modification
  modified_base 15: mod_base = OTHER; note = misc_feature - bicyclic nucleic acid scaffold modification
  modified_base 18: mod_base = OTHER; note = misc_feature - bicyclic nucleic acid scaffold modification
  source 1..18: mol_type = other RNA
attctcaggaatttgtgt

SEQ ID NO: 1906 - RNA, 18 nt, synthetic construct
  modified_base 18: mod_base = OTHER; note = thymine
  misc_feature 1..18: note = Antisense oligonucleotide
  modified_base 1: mod_base = OTHER; note = misc_feature - bicyclic nucleic acid scaffold modification
  modified_base 4: mod_base = OTHER; note = misc_feature - bicyclic nucleic acid scaffold modification
  modified_base 9: mod_base = OTHER; note = misc_feature - bicyclic nucleic acid scaffold modification
  modified_base 15: mod_base = OTHER; note = misc_feature - bicyclic nucleic acid scaffold modification
  modified_base 18: mod_base = OTHER; note = misc_feature - bicyclic nucleic acid scaffold modification
  source 1..18: mol_type = other RNA
attctcaggaatttgtgt

SEQ ID NO: 1907 - RNA, 18 nt, synthetic construct
  modified_base 2: mod_base = OTHER; note = thymine
  modified_base 18: mod_base = OTHER; note = thymine
  misc_feature 1..18: note = Antisense oligonucleotide
  modified_base 1..2: mod_base = OTHER; note = misc_feature - bicyclic nucleic acid scaffold modification
  modified_base 8..9: mod_base = OTHER; note = misc_feature - bicyclic nucleic acid scaffold modification
  modified_base 17..18: mod_base = OTHER; note = misc_feature - bicyclic nucleic acid scaffold modification
  source 1..18: mol_type = other RNA
attctcaggaatttgtgt

SEQ ID NO: 1908 - RNA, 18 nt, synthetic construct
  modified_base 18: mod_base = OTHER; note = thymine
  misc_feature 1..18: note = Antisense oligonucleotide
  modified_base 1: mod_base = OTHER; note = misc_feature - bicyclic nucleic acid scaffold modification
  modified_base 9: mod_base = OTHER; note = misc_feature - bicyclic nucleic acid scaffold modification
  modified_base 15: mod_base = OTHER; note = misc_feature - bicyclic nucleic acid scaffold modification
  modified_base 17..18: mod_base = OTHER; note = misc_feature - bicyclic nucleic acid scaffold modification
  source 1..18: mol_type = other RNA
attctcaggaatttgtgt

SEQ ID NO: 1909 - RNA, 18 nt, synthetic construct
  modified_base 18: mod_base = OTHER; note = thymine
  misc_feature 1..18: note = Antisense oligonucleotide
  modified_base 1: mod_base = OTHER; note = misc_feature - bicyclic nucleic acid scaffold modification
  modified_base 4: mod_base = OTHER; note = misc_feature - bicyclic nucleic acid scaffold modification
  modified_base 9: mod_base = OTHER; note = misc_feature - bicyclic nucleic acid scaffold modification
  modified_base 15: mod_base = OTHER; note = misc_feature - bicyclic nucleic acid scaffold modification
  modified_base 17..18: mod_base = OTHER; note = misc_feature - bicyclic nucleic acid scaffold modification
  source 1..18: mol_type = other RNA
attctcaggaatttgtgt

SEQ ID NO: 1910 - RNA, 18 nt, synthetic construct
  modified_base 1: mod_base = OTHER; note = thymine
  misc_feature 1..18: note = Antisense oligonucleotide
  modified_base 1: mod_base = OTHER; note = misc_feature - bicyclic nucleic acid scaffold modification
  modified_base 18: mod_base = OTHER; note = misc_feature - bicyclic nucleic acid scaffold modification
  source 1..18: mol_type = other RNA
ttctcaggaatttgtgtc

SEQ ID NO: 1911 - RNA, 18 nt, synthetic construct
  modified_base 1: mod_base = OTHER; note = thymine
  misc_feature 1..18: note = Antisense oligonucleotide
  modified_base 1: mod_base = OTHER; note = misc_feature - bicyclic nucleic acid scaffold modification
  modified_base 3: mod_base = OTHER; note = misc_feature - bicyclic nucleic acid scaffold modification
  modified_base 18: mod_base = OTHER; note = misc_feature - bicyclic nucleic acid scaffold modification
  source 1..18: mol_type = other RNA
ttctcaggaatttgtgtc

SEQ ID NO: 1912 - RNA, 18 nt, synthetic construct
  modified_base 1: mod_base = OTHER; note = thymine
  misc_feature 1..18: note = Antisense oligonucleotide
  modified_base 1: mod_base = OTHER; note = misc_feature - bicyclic nucleic acid scaffold modification
  modified_base 5: mod_base = OTHER; note = misc_feature - bicyclic nucleic acid scaffold modification
  modified_base 18: mod_base = OTHER; note = misc_feature - bicyclic nucleic acid scaffold modification
  source 1..18: mol_type = other RNA
ttctcaggaatttgtgtc

SEQ ID NO: 1913 - RNA, 18 nt, synthetic construct
  modified_base 1: mod_base = OTHER; note = thymine
  misc_feature 1..18: note = Antisense oligonucleotide
  modified_base 1: mod_base = OTHER; note = misc_feature - bicyclic nucleic acid scaffold modification
  modified_base 7: mod_base = OTHER; note = misc_feature - bicyclic nucleic acid scaffold modification
  modified_base 18: mod_base = OTHER; note = misc_feature - bicyclic nucleic acid scaffold modification
  source 1..18: mol_type = other RNA
ttctcaggaatttgtgtc

SEQ ID NO: 1914 - RNA, 18 nt, synthetic construct
  modified_base 1: mod_base = OTHER; note = thymine
  misc_feature 1..18: note = Antisense oligonucleotide
  modified_base 1: mod_base = OTHER; note = misc_feature - bicyclic nucleic acid scaffold modification
  modified_base 8: mod_base = OTHER; note = misc_feature - bicyclic nucleic acid scaffold modification
  modified_base 18: mod_base = OTHER; note = misc_feature - bicyclic nucleic acid scaffold modification
  source 1..18: mol_type = other RNA
ttctcaggaatttgtgtc

SEQ ID NO: 1915 - RNA, 18 nt, synthetic construct
  modified_base 1: mod_base = OTHER; note = thymine
  misc_feature 1..18: note = Antisense oligonucleotide
  modified_base 1: mod_base = OTHER; note = misc_feature - bicyclic nucleic acid scaffold modification
  modified_base 14: mod_base = OTHER; note = misc_feature - bicyclic nucleic acid scaffold modification
  modified_base 18: mod_base = OTHER; note = misc_feature - bicyclic nucleic acid scaffold modification
  source 1..18: mol_type = other RNA
ttctcaggaatttgtgtc

SEQ ID NO: 1916 - RNA, 18 nt, synthetic construct
  modified_base 1: mod_base = OTHER; note = thymine
  misc_feature 1..18: note = Antisense oligonucleotide
  modified_base 1: mod_base = OTHER; note = misc_feature - bicyclic nucleic acid scaffold modification
  modified_base 16: mod_base = OTHER; note = misc_feature - bicyclic nucleic acid scaffold modification
  modified_base 18: mod_base = OTHER; note = misc_feature - bicyclic nucleic acid scaffold modification
  source 1..18: mol_type = other RNA
ttctcaggaatttgtgtc

SEQ ID NO: 1917 - RNA, 18 nt, synthetic construct
  modified_base 1: mod_base = OTHER; note = thymine
  misc_feature 1..18: note = Antisense oligonucleotide
  modified_base 1: mod_base = OTHER; note = misc_feature - bicyclic nucleic acid scaffold modification
  modified_base 14: mod_base = OTHER; note = misc_feature - bicyclic nucleic acid scaffold modification
  modified_base 16: mod_base = OTHER; note = misc_feature - bicyclic nucleic acid scaffold modification
  modified_base 18: mod_base = OTHER; note = misc_feature - bicyclic nucleic acid scaffold modification
  source 1..18: mol_type = other RNA
ttctcaggaatttgtgtc

SEQ ID NO: 1918 - RNA, 18 nt, synthetic construct
  modified_base 1: mod_base = OTHER; note = thymine
  misc_feature 1..18: note = Antisense oligonucleotide
  modified_base 1: mod_base = OTHER; note = misc_feature - bicyclic nucleic acid scaffold modification
  modified_base 3: mod_base = OTHER; note = misc_feature - bicyclic nucleic acid scaffold modification
  modified_base 16: mod_base = OTHER; note = misc_feature - bicyclic nucleic acid scaffold modification
  modified_base 18: mod_base = OTHER; note = misc_feature - bicyclic nucleic acid scaffold modification
  source 1..18: mol_type = other RNA
ttctcaggaatttgtgtc

SEQ ID NO: 1919 - RNA, 18 nt, synthetic construct
  modified_base 1: mod_base = OTHER; note = thymine
  misc_feature 1..18: note = Antisense oligonucleotide
  modified_base 1: mod_base = OTHER; note = misc_feature - bicyclic nucleic acid scaffold modification
  modified_base 8: mod_base = OTHER; note = misc_feature - bicyclic nucleic acid scaffold modification
  modified_base 14: mod_base = OTHER; note = misc_feature - bicyclic nucleic acid scaffold modification
  modified_base 18: mod_base = OTHER; note = misc_feature - bicyclic nucleic acid scaffold modification
  source 1..18: mol_type = other RNA
ttctcaggaatttgtgtc

SEQ ID NO: 1920 - RNA, 18 nt, synthetic construct
  modified_base 1: mod_base = OTHER; note = thymine
  misc_feature 1..18: note = Antisense oligonucleotide
  modified_base 1: mod_base = OTHER; note = misc_feature - bicyclic nucleic acid scaffold modification
  modified_base 3: mod_base = OTHER; note = misc_feature - bicyclic nucleic acid scaffold modification
  modified_base 7: mod_base = OTHER; note = misc_feature - bicyclic nucleic acid scaffold modification
  modified_base 14: mod_base = OTHER; note = misc_feature - bicyclic nucleic acid scaffold modification
  modified_base 16: mod_base = OTHER; note = misc_feature - bicyclic nucleic acid scaffold modification
  modified_base 18: mod_base = OTHER; note = misc_feature - bicyclic nucleic acid scaffold modification
  source 1..18: mol_type = other RNA
ttctcaggaatttgtgtc

SEQ ID NO: 1921 - RNA, 18 nt, synthetic construct
  modified_base 1..2: mod_base = OTHER; note = thymine
  modified_base 17: mod_base = OTHER; note = thymine
  misc_feature 1..18: note = Antisense oligonucleotide
  modified_base 1..2: mod_base = OTHER; note = misc_feature - bicyclic nucleic acid scaffold modification
  modified_base 17..18: mod_base = OTHER; note = misc_feature - bicyclic nucleic acid scaffold modification
  source 1..18: mol_type = other RNA
ttctcaggaatttgtgtc

SEQ ID NO: 1922 - RNA, 18 nt, synthetic construct
  modified_base 1..2: mod_base = OTHER; note = thymine
  modified_base 17: mod_base = OTHER; note = thymine
  misc_feature 1..18: note = Antisense oligonucleotide
  modified_base 1..2: mod_base = OTHER; note = misc_feature - bicyclic nucleic acid scaffold modification
  modified_base 8: mod_base = OTHER; note = misc_feature - bicyclic nucleic acid scaffold modification
  modified_base 14: mod_base = OTHER; note = misc_feature - bicyclic nucleic acid scaffold modification
  modified_base 17..18: mod_base = OTHER; note = misc_feature - bicyclic nucleic acid scaffold modification
  source 1..18: mol_type = other RNA
ttctcaggaatttgtgtc

SEQ ID NO: 1923 - RNA, 18 nt, synthetic construct
  modified_base 1: mod_base = OTHER; note = thymine
  modified_base 18: mod_base = OTHER; note = thymine
  misc_feature 1..18: note = Antisense oligonucleotide
  modified_base 1: mod_base = OTHER; note = misc_feature - bicyclic nucleic acid scaffold modification
  modified_base 18: mod_base = OTHER; note = misc_feature - bicyclic nucleic acid scaffold modification
  source 1..18: mol_type = other RNA
tctcaggaatttgtgtct

SEQ ID NO: 1924 - RNA, 18 nt, synthetic construct
  modified_base 1: mod_base = OTHER; note = thymine
  modified_base 18: mod_base = OTHER; note = thymine
  misc_feature 1..18: note = Antisense oligonucleotide
  modified_base 1: mod_base = OTHER; note = misc_feature - bicyclic nucleic acid scaffold modification
  modified_base 4: mod_base = OTHER; note = misc_feature - bicyclic nucleic acid scaffold modification
  modified_base 18: mod_base = OTHER; note = misc_feature - bicyclic nucleic acid scaffold modification
  source 1..18: mol_type = other RNA
tctcaggaatttgtgtct

SEQ ID NO: 1925 - RNA, 18 nt, synthetic construct
  modified_base 1: mod_base = OTHER; note = thymine
  modified_base 18: mod_base = OTHER; note = thymine
  misc_feature 1..18: note = Antisense oligonucleotide
  modified_base 1: mod_base = OTHER; note = misc_feature - bicyclic nucleic acid scaffold modification
  modified_base 6: mod_base = OTHER; note = misc_feature - bicyclic nucleic acid scaffold modification
  modified_base 18: mod_base = OTHER; note = misc_feature - bicyclic nucleic acid scaffold modification
  source 1..18: mol_type = other RNA
tctcaggaatttgtgtct

SEQ ID NO: 1926 - RNA, 18 nt, synthetic construct
  modified_base 1: mod_base = OTHER; note = thymine
  modified_base 18: mod_base = OTHER; note = thymine
  misc_feature 1..18: note = Antisense oligonucleotide
  modified_base 1: mod_base = OTHER; note = misc_feature - bicyclic nucleic acid scaffold modification
  modified_base 7: mod_base = OTHER; note = misc_feature - bicyclic nucleic acid scaffold modification
  modified_base 18: mod_base = OTHER; note = misc_feature - bicyclic nucleic acid scaffold modification
  source 1..18: mol_type = other RNA
tctcaggaatttgtgtct

SEQ ID NO: 1927 - RNA, 18 nt, synthetic construct
  modified_base 1: mod_base = OTHER; note = thymine
  modified_base 18: mod_base = OTHER; note = thymine
  misc_feature 1..18: note = Antisense oligonucleotide
  modified_base 1: mod_base = OTHER; note = misc_feature - bicyclic nucleic acid scaffold modification
  modified_base 13: mod_base = OTHER; note = misc_feature - bicyclic nucleic acid scaffold modification
  modified_base 18: mod_base = OTHER; note = misc_feature - bicyclic nucleic acid scaffold modification
  source 1..18: mol_type = other RNA
tctcaggaatttgtgtct

SEQ ID NO: 1928 - RNA, 18 nt, synthetic construct
  modified_base 1: mod_base = OTHER; note = thymine
  modified_base 18: mod_base = OTHER; note = thymine
  misc_feature 1..18: note = Antisense oligonucleotide
  modified_base 1: mod_base = OTHER; note = misc_feature - bicyclic nucleic acid scaffold modification
  modified_base 15: mod_base = OTHER; note = misc_feature - bicyclic nucleic acid scaffold modification
  modified_base 18: mod_base = OTHER; note = misc_feature - bicyclic nucleic acid scaffold modification
  source 1..18: mol_type = other RNA
tctcaggaatttgtgtct

SEQ ID NO: 1929 - RNA, 18 nt, synthetic construct
  modified_base 1: mod_base = OTHER; note = thymine
  modified_base 18: mod_base = OTHER; note = thymine
  misc_feature 1..18: note = Antisense oligonucleotide
  modified_base 1: mod_base = OTHER; note = misc_feature - bicyclic nucleic acid scaffold modification
  modified_base 6: mod_base = OTHER; note = misc_feature - bicyclic nucleic acid scaffold modification
  modified_base 15: mod_base = OTHER; note = misc_feature - bicyclic nucleic acid scaffold modification
  modified_base 18: mod_base = OTHER; note = misc_feature - bicyclic nucleic acid scaffold modification
  source 1..18: mol_type = other RNA
tctcaggaatttgtgtct

SEQ ID NO: 1930 - RNA, 18 nt, synthetic construct
  modified_base 1: mod_base = OTHER; note = thymine
  modified_base 18: mod_base = OTHER; note = thymine
  misc_feature 1..18: note = Antisense oligonucleotide
  modified_base 1..2: mod_base = OTHER; note = misc_feature - bicyclic nucleic acid scaffold modification
  modified_base 4: mod_base = OTHER; note = misc_feature - bicyclic nucleic acid scaffold modification
  modified_base 17..18: mod_base = OTHER; note = misc_feature - bicyclic nucleic acid scaffold modification
  source 1..18: mol_type = other RNA
tctcaggaatttgtgtct

SEQ ID NO: 1931 - RNA, 18 nt, synthetic construct
  modified_base 1: mod_base = OTHER; note = thymine
  modified_base 18: mod_base = OTHER; note = thymine
  misc_feature 1..18: note = Antisense oligonucleotide
  modified_base 1: mod_base = OTHER; note = misc_feature - bicyclic nucleic acid scaffold modification
  modified_base 13: mod_base = OTHER; note = misc_feature - bicyclic nucleic acid scaffold modification
  modified_base 15: mod_base = OTHER; note = misc_feature - bicyclic nucleic acid scaffold modification
  modified_base 18: mod_base = OTHER; note = misc_feature - bicyclic nucleic acid scaffold modification
  source 1..18: mol_type = other RNA
tctcaggaatttgtgtct

SEQ ID NO: 1932 - RNA, 18 nt, synthetic construct
  modified_base 1: mod_base = OTHER; note = thymine
  modified_base 18: mod_base = OTHER; note = thymine
  misc_feature 1..18: note = Antisense oligonucleotide
  modified_base 1: mod_base = OTHER; note = misc_feature - bicyclic nucleic acid scaffold modification
  modified_base 6: mod_base = OTHER; note = misc_feature - bicyclic nucleic acid scaffold modification
  modified_base 13: mod_base = OTHER; note = misc_feature - bicyclic nucleic acid scaffold modification
  modified_base 15: mod_base = OTHER; note = misc_feature - bicyclic nucleic acid scaffold modification
  modified_base 18: mod_base = OTHER; note = misc_feature - bicyclic nucleic acid scaffold modification
  source 1..18: mol_type = other RNA
tctcaggaatttgtgtct

SEQ ID NO: 1933 - RNA, 18 nt, synthetic construct
  modified_base 1: mod_base = OTHER; note = thymine
  modified_base 18: mod_base = OTHER; note = thymine
  misc_feature 1..18: note = Antisense oligonucleotide
  modified_base 1..2: mod_base = OTHER; note = misc_feature - bicyclic nucleic acid scaffold modification
  modified_base 7: mod_base = OTHER; note = misc_feature - bicyclic nucleic acid scaffold modification
  modified_base 13: mod_base = OTHER; note = misc_feature - bicyclic nucleic acid scaffold modification
  modified_base 17..18: mod_base = OTHER; note = misc_feature - bicyclic nucleic acid scaffold modification
  source 1..18: mol_type = other RNA
tctcaggaatttgtgtct

SEQ ID NO: 1934 - RNA, 18 nt, synthetic construct
  modified_base 18: mod_base = OTHER; note = thymine
  misc_feature 1..18: note = Antisense oligonucleotide
  modified_base 1: mod_base = OTHER; note = misc_feature - bicyclic nucleic acid scaffold modification
  modified_base 18: mod_base = OTHER; note = misc_feature - bicyclic nucleic acid scaffold modification
  source 1..18: mol_type = other RNA
ctcaggaatttgtgtctt

SEQ ID NO: 1935 - RNA, 18 nt, synthetic construct
  modified_base 18: mod_base = OTHER; note = thymine
  misc_feature 1..18: note = Antisense oligonucleotide
  modified_base 1: mod_base = OTHER; note = misc_feature - bicyclic nucleic acid scaffold modification
  modified_base 3: mod_base = OTHER; note = misc_feature - bicyclic nucleic acid scaffold modification
  modified_base 18: mod_base = OTHER; note = misc_feature - bicyclic nucleic acid scaffold modification
  source 1..18: mol_type = other RNA
ctcaggaatttgtgtctt

SEQ ID NO: 1936 - RNA, 18 nt, synthetic construct
  modified_base 18: mod_base = OTHER; note = thymine
  misc_feature 1..18: note = Antisense oligonucleotide
  modified_base 1: mod_base = OTHER; note = misc_feature - bicyclic nucleic acid scaffold modification
  modified_base 5: mod_base = OTHER; note = misc_feature - bicyclic nucleic acid scaffold modification
  modified_base 18: mod_base = OTHER; note = misc_feature - bicyclic nucleic acid scaffold modification
  source 1..18: mol_type = other RNA
ctcaggaatttgtgtctt

SEQ ID NO: 1937 - RNA, 18 nt, synthetic construct
  modified_base 18: mod_base = OTHER; note = thymine
  misc_feature 1..18: note = Antisense oligonucleotide
  modified_base 1: mod_base = OTHER; note = misc_feature - bicyclic nucleic acid scaffold modification
  modified_base 6: mod_base = OTHER; note = misc_feature - bicyclic nucleic acid scaffold modification
  modified_base 12: mod_base = OTHER; note = misc_feature - bicyclic nucleic acid scaffold modification
  modified_base 18: mod_base = OTHER; note = misc_feature - bicyclic nucleic acid scaffold modification
  source 1..18: mol_type = other RNA
ctcaggaatttgtgtctt

SEQ ID NO: 1938 - RNA, 18 nt, synthetic construct
  modified_base 18: mod_base = OTHER; note = thymine
  misc_feature 1..18: note = Antisense oligonucleotide
  modified_base 1: mod_base = OTHER; note = misc_feature - bicyclic nucleic acid scaffold modification
  modified_base 14: mod_base = OTHER; note = misc_feature - bicyclic nucleic acid scaffold modification
  modified_base 18: mod_base = OTHER; note = misc_feature - bicyclic nucleic acid scaffold modification
  source 1..18: mol_type = other RNA
ctcaggaatttgtgtctt

SEQ ID NO: 1939 - RNA, 18 nt, synthetic construct
  modified_base 18: mod_base = OTHER; note = thymine
  misc_feature 1..18: note = Antisense oligonucleotide
  modified_base 1: mod_base = OTHER; note = misc_feature - bicyclic nucleic acid scaffold modification
  modified_base 16: mod_base = OTHER; note = misc_feature - bicyclic nucleic acid scaffold modification
  modified_base 18: mod_base = OTHER; note = misc_feature - bicyclic nucleic acid scaffold modification
  source 1..18: mol_type = other RNA
ctcaggaatttgtgtctt

SEQ ID NO: 1940 - RNA, 18 nt, synthetic construct
  modified_base 18: mod_base = OTHER; note = thymine
  misc_feature 1..18: note = Antisense oligonucleotide
  modified_base 1: mod_base = OTHER; note = misc_feature - bicyclic nucleic acid scaffold modification
  modified_base 3: mod_base = OTHER; note = misc_feature - bicyclic nucleic acid scaffold modification
  modified_base 16: mod_base = OTHER; note = misc_feature - bicyclic nucleic acid scaffold modification
  modified_base 18: mod_base = OTHER; note = misc_feature - bicyclic nucleic acid scaffold modification
  source 1..18: mol_type = other RNA
ctcaggaatttgtgtctt

SEQ ID NO: 1941 - RNA, 18 nt, synthetic construct
  modified_base 18: mod_base = OTHER; note = thymine
  misc_feature 1..18: note = Antisense oligonucleotide
  modified_base 1: mod_base = OTHER; note = misc_feature - bicyclic nucleic acid scaffold modification
  modified_base 5: mod_base = OTHER; note = misc_feature - bicyclic nucleic acid scaffold modification
  modified_base 11..12: mod_base = OTHER; note = misc_feature - bicyclic nucleic acid scaffold modification
  modified_base 14: mod_base = OTHER; note = misc_feature - bicyclic nucleic acid scaffold modification
  modified_base 18: mod_base = OTHER; note = misc_feature - bicyclic nucleic acid scaffold modification
  source 1..18: mol_type = other RNA
ctcaggaatttgtgtctt

SEQ ID NO: 1942 - RNA, 18 nt, synthetic construct
  modified_base 18: mod_base = OTHER; note = thymine
  misc_feature 1..18: note = Antisense oligonucleotide
  modified_base 1: mod_base = OTHER; note = misc_feature - bicyclic nucleic acid scaffold modification
  modified_base 3: mod_base = OTHER; note = misc_feature - bicyclic nucleic acid scaffold modification
  modified_base 6: mod_base = OTHER; note = misc_feature - bicyclic nucleic acid scaffold modification
  modified_base 12: mod_base = OTHER; note = misc_feature - bicyclic nucleic acid scaffold modification
  modified_base 16: mod_base = OTHER; note = misc_feature - bicyclic nucleic acid scaffold modification
  modified_base 18: mod_base = OTHER; note = misc_feature - bicyclic nucleic acid scaffold modification
  source 1..18: mol_type = other RNA
ctcaggaatttgtgtctt

SEQ ID NO: 1943 - RNA, 18 nt, synthetic construct
  modified_base 18: mod_base = OTHER; note = thymine
  misc_feature 1..18: note = Antisense oligonucleotide
  modified_base 1: mod_base = OTHER; note = misc_feature - bicyclic nucleic acid scaffold modification
  modified_base 5..6: mod_base = OTHER; note = misc_feature - bicyclic nucleic acid scaffold modification
  modified_base 12: mod_base = OTHER; note = misc_feature - bicyclic nucleic acid scaffold modification
  modified_base 14: mod_base = OTHER; note = misc_feature - bicyclic nucleic acid scaffold modification
  modified_base 18: mod_base = OTHER; note = misc_feature - bicyclic nucleic acid scaffold modification
  source 1..18: mol_type = other RNA
ctcaggaatttgtgtctt

SEQ ID NO: 1944 - RNA, 18 nt, synthetic construct
  modified_base 2: mod_base = OTHER; note = thymine
  modified_base 17..18: mod_base = OTHER; note = thymine
  misc_feature 1..18: note = Antisense oligonucleotide
  modified_base 1..2: mod_base = OTHER; note = misc_feature - bicyclic nucleic acid scaffold modification
  modified_base 6: mod_base = OTHER; note = misc_feature - bicyclic nucleic acid scaffold modification
  modified_base 12: mod_base = OTHER; note = misc_feature - bicyclic nucleic acid scaffold modification
  modified_base 17..18: mod_base = OTHER; note = misc_feature - bicyclic nucleic acid scaffold modification
  source 1..18: mol_type = other RNA
ctcaggaatttgtgtctt

SEQ ID NO: 1945 - RNA, 18 nt, synthetic construct
  modified_base 1: mod_base = OTHER; note = thymine
  modified_base 18: mod_base = OTHER; note = thymine
  misc_feature 1..18: note = Antisense oligonucleotide
  modified_base 1: mod_base = OTHER; note = misc_feature - bicyclic nucleic acid scaffold modification
  modified_base 18: mod_base = OTHER; note = misc_feature - bicyclic nucleic acid scaffold modification
  source 1..18: mol_type = other RNA
tcaggaatttgtgtcttt

SEQ ID NO: 1946 - RNA, 18 nt, synthetic construct
  modified_base 1: mod_base = OTHER; note = thymine
  modified_base 18: mod_base = OTHER; note = thymine
  misc_feature 1..18: note = Antisense oligonucleotide
  modified_base 1: mod_base = OTHER; note = misc_feature - bicyclic nucleic acid scaffold modification
  modified_base 4: mod_base = OTHER; note = misc_feature - bicyclic nucleic acid scaffold modification
  modified_base 18: mod_base = OTHER; note = misc_feature - bicyclic nucleic acid scaffold modification
  source 1..18: mol_type = other RNA
tcaggaatttgtgtcttt

SEQ ID NO: 1947 - RNA, 18 nt, synthetic construct
  modified_base 1: mod_base = OTHER; note = thymine
  modified_base 18: mod_base = OTHER; note = thymine
  misc_feature 1..18: note = Antisense oligonucleotide
  modified_base 1: mod_base = OTHER; note = misc_feature - bicyclic nucleic acid scaffold modification
  modified_base 5: mod_base = OTHER; note = misc_feature - bicyclic nucleic acid scaffold modification
  modified_base 18: mod_base = OTHER; note = misc_feature - bicyclic nucleic acid scaffold modification
  source 1..18: mol_type = other RNA
tcaggaatttgtgtcttt

SEQ ID NO: 1948 - RNA, 18 nt, synthetic construct
  modified_base 1: mod_base = OTHER; note = thymine
  modified_base 18: mod_base = OTHER; note = thymine
  misc_feature 1..18: note = Antisense oligonucleotide
  modified_base 1: mod_base = OTHER; note = misc_feature - bicyclic nucleic acid scaffold modification
  modified_base 11: mod_base = OTHER; note = misc_feature - bicyclic nucleic acid scaffold modification
  modified_base 18: mod_base = OTHER; note = misc_feature - bicyclic nucleic acid scaffold modification
  source 1..18: mol_type = other RNA
tcaggaatttgtgtcttt

SEQ ID NO: 1949 - RNA, 18 nt, synthetic construct
  modified_base 1: mod_base = OTHER; note = thymine
  modified_base 18: mod_base = OTHER; note = thymine
  misc_feature 1..18: note = Antisense oligonucleotide
  modified_base 1: mod_base = OTHER; note = misc_feature - bicyclic nucleic acid scaffold modification
  modified_base 13: mod_base = OTHER; note = misc_feature - bicyclic nucleic acid scaffold modification
  modified_base 18: mod_base = OTHER; note = misc_feature - bicyclic nucleic acid scaffold modification
  source 1..18: mol_type = other RNA
tcaggaatttgtgtcttt

SEQ ID NO: 1950 - RNA, 18 nt, synthetic construct
  modified_base 1: mod_base = OTHER; note = thymine
  modified_base 18: mod_base = OTHER; note = thymine
  misc_feature 1..18: note = Antisense oligonucleotide
  modified_base 1: mod_base = OTHER; note = misc_feature - bicyclic nucleic acid scaffold modification
  modified_base 15: mod_base = OTHER; note = misc_feature - bicyclic nucleic acid scaffold modification
  modified_base 18: mod_base = OTHER; note = misc_feature - bicyclic nucleic acid scaffold modification
  source 1..18: mol_type = other RNA
tcaggaatttgtgtcttt

SEQ ID NO: 1951 - RNA, 18 nt, synthetic construct
  modified_base 1: mod_base = OTHER; note = thymine
  modified_base 18: mod_base = OTHER; note = thymine
  misc_feature 1..18: note = Antisense oligonucleotide
  modified_base 1..2: mod_base = OTHER; note = misc_feature - bicyclic nucleic acid scaffold modification
  modified_base 15: mod_base = OTHER; note = misc_feature - bicyclic nucleic acid scaffold modification
  modified_base 18: mod_base = OTHER; note = misc_feature - bicyclic nucleic acid scaffold modification
  source 1..18: mol_type = other RNA
tcaggaatttgtgtcttt

SEQ ID NO: 1952 - RNA, 18 nt, synthetic construct
  modified_base 1: mod_base = OTHER; note = thymine
  modified_base 18: mod_base = OTHER; note = thymine
  misc_feature 1..18: note = Antisense oligonucleotide
  modified_base 1: mod_base = OTHER; note = misc_feature - bicyclic nucleic acid scaffold modification
  modified_base 11: mod_base = OTHER; note = misc_feature - bicyclic nucleic acid scaffold modification
  modified_base 13: mod_base = OTHER; note = misc_feature - bicyclic nucleic acid scaffold modification
  modified_base 18: mod_base = OTHER; note = misc_feature - bicyclic nucleic acid scaffold modification
  source 1..18: mol_type = other RNA
tcaggaatttgtgtcttt

SEQ ID NO: 1953 - RNA, 18 nt, synthetic construct
  modified_base 1: mod_base = OTHER; note = thymine
  modified_base 18: mod_base = OTHER; note = thymine
  misc_feature 1..18: note = Antisense oligonucleotide
  modified_base 1: mod_base = OTHER; note = misc_feature - bicyclic nucleic acid scaffold modification
  modified_base 4: mod_base = OTHER; note = misc_feature - bicyclic nucleic acid scaffold modification
  modified_base 11: mod_base = OTHER; note = misc_feature - bicyclic nucleic acid scaffold modification
  modified_base 13: mod_base = OTHER; note = misc_feature - bicyclic nucleic acid scaffold modification
  modified_base 18: mod_base = OTHER; note = misc_feature - bicyclic nucleic acid scaffold modification
  source 1..18: mol_type = other RNA
tcaggaatttgtgtcttt

SEQ ID NO: 1954 - RNA, 18 nt, synthetic construct
  modified_base 1: mod_base = OTHER; note = thymine
  modified_base 17..18: mod_base = OTHER; note = thymine
  misc_feature 1..18: note = Antisense oligonucleotide
  modified_base 1..2: mod_base = OTHER; note = misc_feature - bicyclic nucleic acid scaffold modification
  modified_base 11: mod_base = OTHER; note = misc_feature - bicyclic nucleic acid scaffold modification
  modified_base 17..18: mod_base = OTHER; note = misc_feature - bicyclic nucleic acid scaffold modification
  source 1..18: mol_type = other RNA
tcaggaatttgtgtcttt

SEQ ID NO: 1955 - RNA, 18 nt, synthetic construct
  modified_base 1: mod_base = OTHER; note = thymine
  modified_base 18: mod_base = OTHER; note = thymine
  misc_feature 1..18: note = Antisense oligonucleotide
  modified_base 1: mod_base = OTHER; note = misc_feature - bicyclic nucleic acid scaffold modification
  modified_base 5: mod_base = OTHER; note = misc_feature - bicyclic nucleic acid scaffold modification
  modified_base 11: mod_base = OTHER; note = misc_feature - bicyclic nucleic acid scaffold modification
  modified_base 13: mod_base = OTHER; note = misc_feature - bicyclic nucleic acid scaffold modification
  modified_base 15: mod_base = OTHER; note = misc_feature - bicyclic nucleic acid scaffold modification
  modified_base 18: mod_base = OTHER; note = misc_feature - bicyclic nucleic acid scaffold modification
  source 1..18: mol_type = other RNA
tcaggaatttgtgtcttt

SEQ ID NO: 1956 - RNA, 18 nt, synthetic construct
  misc_feature 1..18: note = Antisense oligonucleotide
  modified_base 1: mod_base = OTHER; note = misc_feature - bicyclic nucleic acid scaffold modification
  modified_base 18: mod_base = OTHER; note = misc_feature - bicyclic nucleic acid scaffold modification
  source 1..18: mol_type = other RNA
caggaatttgtgtctttc

SEQ ID NO: 1957 - RNA, 18 nt, synthetic construct
  misc_feature 1..18: note = Antisense oligonucleotide
  modified_base 1: mod_base = OTHER; note = misc_feature - bicyclic nucleic acid scaffold modification
  modified_base 14: mod_base = OTHER; note = misc_feature - bicyclic nucleic acid scaffold modification
  modified_base 18: mod_base = OTHER; note = misc_feature - bicyclic nucleic acid scaffold modification
  source 1..18: mol_type = other RNA
caggaatttgtgtctttc

SEQ ID NO: 1958 - RNA, 18 nt, synthetic construct
  misc_feature 1..18: note = Antisense oligonucleotide
  modified_base 1: mod_base = OTHER; note = misc_feature - bicyclic nucleic acid scaffold modification
  modified_base 12: mod_base = OTHER; note = misc_feature - bicyclic nucleic acid scaffold modification
  modified_base 18: mod_base = OTHER; note = misc_feature - bicyclic nucleic acid scaffold modification
  source 1..18: mol_type = other RNA
caggaatttgtgtctttc

SEQ ID NO: 1959 - RNA, 18 nt, synthetic construct
  misc_feature 1..18: note = Antisense oligonucleotide
  modified_base 1: mod_base = OTHER; note = misc_feature - bicyclic nucleic acid scaffold modification
  modified_base 10: mod_base = OTHER; note = misc_feature - bicyclic nucleic acid scaffold modification
  modified_base 18: mod_base = OTHER; note = misc_feature - bicyclic nucleic acid scaffold modification
  source 1..18: mol_type = other RNA
caggaatttgtgtctttc

SEQ ID NO: 1960 - RNA, 18 nt, synthetic construct
  misc_feature 1..18: note = Antisense oligonucleotide
  modified_base 1: mod_base = OTHER; note = misc_feature - bicyclic nucleic acid scaffold modification
  modified_base 4: mod_base = OTHER; note = misc_feature - bicyclic nucleic acid scaffold modification
  modified_base 18: mod_base = OTHER; note = misc_feature - bicyclic nucleic acid scaffold modification
  source 1..18: mol_type = other RNA
caggaatttgtgtctttc

SEQ ID NO: 1961 - RNA, 18 nt, synthetic construct
  misc_feature 1..18: note = Antisense oligonucleotide
  modified_base 1: mod_base = OTHER; note = misc_feature - bicyclic nucleic acid scaffold modification
  modified_base 3: mod_base = OTHER; note = misc_feature - bicyclic nucleic acid scaffold modification
  modified_base 18: mod_base = OTHER; note = misc_feature - bicyclic nucleic acid scaffold modification
  source 1..18: mol_type = other RNA
caggaatttgtgtctttc

SEQ ID NO: 1962 - RNA, 18 nt, synthetic construct
  misc_feature 1..18: note = Antisense oligonucleotide
  modified_base 1: mod_base = OTHER; note = misc_feature - bicyclic nucleic acid scaffold modification
  modified_base 3: mod_base = OTHER; note = misc_feature - bicyclic nucleic acid scaffold modification
  modified_base 14: mod_base = OTHER; note = misc_feature - bicyclic nucleic acid scaffold modification
  modified_base 18: mod_base = OTHER; note = misc_feature - bicyclic nucleic acid scaffold modification
  source 1..18: mol_type = other RNA
caggaatttgtgtctttc

SEQ ID NO: 1963 - RNA, 18 nt, synthetic construct
  misc_feature 1..18: note = Antisense oligonucleotide
  modified_base 1: mod_base = OTHER; note = misc_feature - bicyclic nucleic acid scaffold modification
  modified_base 4: mod_base = OTHER; note = misc_feature - bicyclic nucleic acid scaffold modification
  modified_base 10: mod_base = OTHER; note = misc_feature - bicyclic nucleic acid scaffold modification
  modified_base 14: mod_base = OTHER; note = misc_feature - bicyclic nucleic acid scaffold modification
  modified_base 18: mod_base = OTHER; note = misc_feature - bicyclic nucleic acid scaffold modification
  source 1..18: mol_type = other RNA
caggaatttgtgtctttc

SEQ ID NO: 1964 - RNA, 18 nt, synthetic construct
  modified_base 17: mod_base = OTHER; note = thymine
  misc_feature 1..18: note = Antisense oligonucleotide
  modified_base 1: mod_base = OTHER; note = misc_feature - bicyclic nucleic acid scaffold modification
  modified_base 10: mod_base = OTHER; note = misc_feature - bicyclic nucleic acid scaffold modification
  modified_base 12: mod_base = OTHER; note = misc_feature - bicyclic nucleic acid scaffold modification
  modified_base 17..18: mod_base = OTHER; note = misc_feature - bicyclic nucleic acid scaffold modification
  source 1..18: mol_type = other RNA
caggaatttgtgtctttc

SEQ ID NO: 1965 - RNA, 18 nt, synthetic construct
  misc_feature 1..18: note = Antisense oligonucleotide
  modified_base 1: mod_base = OTHER; note = misc_feature - bicyclic nucleic acid scaffold modification
  modified_base 4: mod_base = OTHER; note = misc_feature - bicyclic nucleic acid scaffold modification
  modified_base 10: mod_base = OTHER; note = misc_feature - bicyclic nucleic acid scaffold modification
  modified_base 14: mod_base = OTHER; note = misc_feature - bicyclic nucleic acid scaffold modification
  modified_base 18: mod_base = OTHER; note = misc_feature - bicyclic nucleic acid scaffold modification
  source 1..18: mol_type = other RNA
caggaatttgtgtctttc

SEQ ID NO: 1966 - RNA, 18 nt, synthetic construct
  modified_base 17: mod_base = OTHER; note = thymine
  misc_feature 1..18: note = Antisense oligonucleotide
  modified_base 1..2: mod_base = OTHER; note = misc_feature - bicyclic nucleic acid scaffold modification
  modified_base 10: mod_base = OTHER; note = misc_feature - bicyclic nucleic acid scaffold modification
  modified_base 12: mod_base = OTHER; note = misc_feature - bicyclic nucleic acid scaffold modification
  modified_base 17..18: mod_base = OTHER; note = misc_feature - bicyclic nucleic acid scaffold modification
  source 1..18: mol_type = other RNA
caggaatttgtgtctttc

SEQ ID NO: 1967 - RNA, 16 nt, synthetic construct
  modified_base 16: mod_base = OTHER; note = thymine
  misc_feature 1..16: note = Antisense oligonucleotide
  modified_base 1: mod_base = OTHER; note = misc_feature - bicyclic nucleic acid scaffold modification
  modified_base 16: mod_base = OTHER; note = misc_feature - bicyclic nucleic acid scaffold modification
  source 1..16: mol_type = other RNA
attctcaggaatttgt

SEQ ID NO: 1968 - RNA, 16 nt, synthetic construct
  modified_base 16: mod_base = OTHER; note = thymine
  misc_feature 1..16: note = Antisense oligonucleotide
  modified_base 1: mod_base = OTHER; note = misc_feature - bicyclic nucleic acid scaffold modification
  modified_base 15..16: mod_base = OTHER; note = misc_feature - bicyclic nucleic acid scaffold modification
  source 1..16: mol_type = other RNA
attctcaggaatttgt

SEQ ID NO: 1969 - RNA, 16 nt, synthetic construct
  modified_base 16: mod_base = OTHER; note = thymine
  misc_feature 1..16: note = Antisense oligonucleotide
  modified_base 1: mod_base = OTHER; note = misc_feature - bicyclic nucleic acid scaffold modification
  modified_base 9: mod_base = OTHER; note = misc_feature - bicyclic nucleic acid scaffold modification
  modified_base 16: mod_base = OTHER; note = misc_feature - bicyclic nucleic acid scaffold modification
  source 1..16: mol_type = other RNA
attctcaggaatttgt

SEQ ID NO: 1970 - RNA, 16 nt, synthetic construct
  modified_base 16: mod_base = OTHER; note = thymine
  misc_feature 1..16: note = Antisense oligonucleotide
  modified_base 1: mod_base = OTHER; note = misc_feature - bicyclic nucleic acid scaffold modification
  modified_base 8: mod_base = OTHER; note = misc_feature - bicyclic nucleic acid scaffold modification
  modified_base 16: mod_base = OTHER; note = misc_feature - bicyclic nucleic acid scaffold modification
  source 1..16: mol_type = other RNA
attctcaggaatttgt

SEQ ID NO: 1971 - RNA, 16 nt, synthetic construct
  modified_base 16: mod_base = OTHER; note = thymine
  misc_feature 1..16: note = Antisense oligonucleotide
  modified_base 1: mod_base = OTHER; note = misc_feature - bicyclic nucleic acid scaffold modification
  modified_base 6: mod_base = OTHER; note = misc_feature - bicyclic nucleic acid scaffold modification
  modified_base 16: mod_base = OTHER; note = misc_feature - bicyclic nucleic acid scaffold modification
  source 1..16: mol_type = other RNA
attctcaggaatttgt

SEQ ID NO: 1972 - RNA, 16 nt, synthetic construct
  modified_base 16: mod_base = OTHER; note = thymine
  misc_feature 1..16: note = Antisense oligonucleotide
  modified_base 1: mod_base = OTHER; note = misc_feature - bicyclic nucleic acid scaffold modification
  modified_base 4: mod_base = OTHER; note = misc_feature - bicyclic nucleic acid scaffold modification
  modified_base 16: mod_base = OTHER; note = misc_feature - bicyclic nucleic acid scaffold modification
  source 1..16: mol_type = other RNA
attctcaggaatttgt

SEQ ID NO: 1973 - RNA, 16 nt, synthetic construct
  modified_base 16: mod_base = OTHER; note = thymine
  misc_feature 1..16: note = Antisense oligonucleotide
  modified_base 1: mod_base = OTHER; note = misc_feature - bicyclic nucleic acid scaffold modification
  modified_base 9: mod_base = OTHER; note = misc_feature - bicyclic nucleic acid scaffold modification
  modified_base 15..16: mod_base = OTHER; note = misc_feature - bicyclic nucleic acid scaffold modification
  source 1..16: mol_type = other RNA
attctcaggaatttgt

SEQ ID NO: 1974 - RNA, 16 nt, synthetic construct
  modified_base 16: mod_base = OTHER; note = thymine
  misc_feature 1..16: note = Antisense oligonucleotide
  modified_base 1: mod_base = OTHER; note = misc_feature - bicyclic nucleic acid scaffold modification
  modified_base 4: mod_base = OTHER; note = misc_feature - bicyclic nucleic acid scaffold modification
  modified_base 6: mod_base = OTHER; note = misc_feature - bicyclic nucleic acid scaffold modification
  modified_base 16: mod_base = OTHER; note = misc_feature - bicyclic nucleic acid scaffold modification
  source 1..16: mol_type = other RNA
attctcaggaatttgt

SEQ ID NO: 1975 - RNA, 16 nt, synthetic construct
  modified_base 16: mod_base = OTHER; note = thymine
  misc_feature 1..16: note = Antisense oligonucleotide
  modified_base 1: mod_base = OTHER; note = misc_feature - bicyclic nucleic acid scaffold modification
  modified_base 8..9: mod_base = OTHER; note = misc_feature - bicyclic nucleic acid scaffold modification
  modified_base 15..16: mod_base = OTHER; note = misc_feature - bicyclic nucleic acid scaffold modification
  source 1..16: mol_type = other RNA
attctcaggaatttgt

SEQ ID NO: 1976 - RNA, 16 nt, synthetic construct
  modified_base 16: mod_base = OTHER; note = thymine
  misc_feature 1..16: note = Antisense oligonucleotide
  modified_base 1: mod_base = OTHER; note = misc_feature - bicyclic nucleic acid scaffold modification
  modified_base 4: mod_base = OTHER; note = misc_feature - bicyclic nucleic acid scaffold modification
  modified_base 9: mod_base = OTHER; note = misc_feature - bicyclic nucleic acid scaffold modification
  modified_base 16: mod_base = OTHER; note = misc_feature - bicyclic nucleic acid scaffold modification
  source 1..16: mol_type = other RNA
attctcaggaatttgt

SEQ ID NO: 1977 - RNA, 16 nt, synthetic construct
  modified_base 2: mod_base = OTHER; note = thymine
  modified_base 16: mod_base = OTHER; note = thymine
  misc_feature 1..16: note = Antisense oligonucleotide
  modified_base 1..2: mod_base = OTHER; note = misc_feature - bicyclic nucleic acid scaffold modification
  modified_base 8..9: mod_base = OTHER; note = misc_feature - bicyclic nucleic acid scaffold modification
  modified_base 15..16: mod_base = OTHER; note = misc_feature - bicyclic nucleic acid scaffold modification
  source 1..16: mol_type = other RNA
attctcaggaatttgt

SEQ ID NO: 1978 - RNA, 16 nt, synthetic construct
  modified_base 1: mod_base = OTHER; note = thymine
  misc_feature 1..16: note = Antisense oligonucleotide
  modified_base 1: mod_base = OTHER; note = misc_feature - bicyclic nucleic acid scaffold modification
  modified_base 16: mod_base = OTHER; note = misc_feature - bicyclic nucleic acid scaffold modification
  source 1..16: mol_type = other RNA
ttctcaggaatttgtg

SEQ ID NO: 1979 - RNA, 16 nt, synthetic construct
  modified_base 1: mod_base = OTHER; note = thymine
  misc_feature 1..16: note = Antisense oligonucleotide
  modified_base 1: mod_base = OTHER; note = misc_feature - bicyclic nucleic acid scaffold modification
  modified_base 14: mod_base = OTHER; note = misc_feature - bicyclic nucleic acid scaffold modification
  modified_base 16: mod_base = OTHER; note = misc_feature - bicyclic nucleic acid scaffold modification
  source 1..16: mol_type = other RNA
ttctcaggaatttgtg

SEQ ID NO: 1980 - RNA, 16 nt, synthetic construct
  modified_base 1: mod_base = OTHER; note = thymine
  misc_feature 1..16: note = Antisense oligonucleotide
  modified_base 1: mod_base = OTHER; note = misc_feature - bicyclic nucleic acid scaffold modification
  modified_base 8: mod_base = OTHER; note = misc_feature - bicyclic nucleic acid scaffold modification
  modified_base 16: mod_base = OTHER; note = misc_feature - bicyclic nucleic acid scaffold modification
  source 1..16: mol_type = other RNA
ttctcaggaatttgtg

SEQ ID NO: 1981 - RNA, 16 nt, synthetic construct
  modified_base 1: mod_base = OTHER; note = thymine
  misc_feature 1..16: note = Antisense oligonucleotide
  modified_base 1: mod_base = OTHER; note = misc_feature - bicyclic nucleic acid scaffold modification
  modified_base 7: mod_base = OTHER; note = misc_feature - bicyclic nucleic acid scaffold modification
  modified_base 16: mod_base = OTHER; note = misc_feature - bicyclic nucleic acid scaffold modification
  source 1..16: mol_type = other RNA
ttctcaggaatttgtg

SEQ ID NO: 1982 - RNA, 16 nt, synthetic construct
  modified_base 1: mod_base = OTHER; note = thymine
  misc_feature 1..16: note = Antisense oligonucleotide
  modified_base 1: mod_base = OTHER; note = misc_feature - bicyclic nucleic acid scaffold modification
  modified_base 5: mod_base = OTHER; note = misc_feature - bicyclic nucleic acid scaffold modification
  modified_base 16: mod_base = OTHER; note = misc_feature - bicyclic nucleic acid scaffold modification
  source 1..16: mol_type = other RNA
ttctcaggaatttgtg

SEQ ID NO: 1983 - RNA, 16 nt, synthetic construct
  modified_base 1: mod_base = OTHER; note = thymine
  misc_feature 1..16: note = Antisense oligonucleotide
  modified_base 1: mod_base = OTHER; note = misc_feature - bicyclic nucleic acid scaffold modification
  modified_base 3: mod_base = OTHER; note = misc_feature - bicyclic nucleic acid scaffold modification
  modified_base 16: mod_base = OTHER; note = misc_feature - bicyclic nucleic acid scaffold modification
  source 1..16: mol_type = other RNA
ttctcaggaatttgtg

SEQ ID NO: 1984 - RNA, 16 nt, synthetic construct
  modified_base 1: mod_base = OTHER; note = thymine
  misc_feature 1..16: note = Antisense oligonucleotide
  modified_base 1: mod_base = OTHER; note = misc_feature - bicyclic nucleic acid scaffold modification
  modified_base 3: mod_base = OTHER; note = misc_feature - bicyclic nucleic acid scaffold modification
  modified_base 5: mod_base = OTHER; note = misc_feature - bicyclic nucleic acid scaffold modification
  modified_base 16: mod_base = OTHER; note = misc_feature - bicyclic nucleic acid scaffold modification
  source 1..16: mol_type = other RNA
ttctcaggaatttgtg

SEQ ID NO: 1985 - RNA, 16 nt, synthetic construct
  modified_base 1: mod_base = OTHER; note = thymine
  misc_feature 1..16: note = Antisense oligonucleotide
  modified_base 1: mod_base = OTHER; note = misc_feature - bicyclic nucleic acid scaffold modification
  modified_base 8: mod_base = OTHER; note = misc_feature - bicyclic nucleic acid scaffold modification
  modified_base 14: mod_base = OTHER; note = misc_feature - bicyclic nucleic acid scaffold modification
  modified_base 16: mod_base = OTHER; note = misc_feature - bicyclic nucleic acid scaffold modification
  source 1..16: mol_type = other RNA
ttctcaggaatttgtg

SEQ ID NO: 1986 - RNA, 16 nt, synthetic construct
  modified_base 1: mod_base = OTHER; note = thymine
  misc_feature 1..16: note = Antisense oligonucleotide
  modified_base 1: mod_base = OTHER; note = misc_feature - bicyclic nucleic acid scaffold modification
  modified_base 3: mod_base = OTHER; note = misc_feature - bicyclic nucleic acid scaffold modification
  modified_base 7: mod_base = OTHER; note = misc_feature - bicyclic nucleic acid scaffold modification
  modified_base 14: mod_base = OTHER; note = misc_feature - bicyclic nucleic acid scaffold modification
  modified_base 16: mod_base = OTHER; note = misc_feature - bicyclic nucleic acid scaffold modification
  source 1..16: mol_type = other RNA
ttctcaggaatttgtg

SEQ ID NO: 1987 - RNA, 16 nt, synthetic construct
  modified_base 1: mod_base = OTHER; note = thymine
  modified_base 15: mod_base = OTHER; note = thymine
  misc_feature 1..16: note = Antisense oligonucleotide
  modified_base 1: mod_base = OTHER; note = misc_feature - bicyclic nucleic acid scaffold modification
  modified_base 3: mod_base = OTHER; note = misc_feature - bicyclic nucleic acid scaffold modification
  modified_base 8: mod_base = OTHER; note = misc_feature - bicyclic nucleic acid scaffold modification
  modified_base 15..16: mod_base = OTHER; note = misc_feature - bicyclic nucleic acid scaffold modification
  source 1..16: mol_type = other RNA
ttctcaggaatttgtg

SEQ ID NO: 1988 - RNA, 16 nt, synthetic construct
  modified_base 1: mod_base = OTHER; note = thymine
  modified_base 16: mod_base = OTHER; note = thymine
  misc_feature 1..16: note = Antisense oligonucleotide
  modified_base 1: mod_base = OTHER; note = misc_feature - bicyclic nucleic acid scaffold modification
  modified_base 16: mod_base = OTHER; note = misc_feature - bicyclic nucleic acid scaffold modification
  source 1..16: mol_type = other RNA
tctcaggaatttgtgt

SEQ ID NO: 1989 - RNA, 16 nt, synthetic construct
  modified_base 1: mod_base = OTHER; note = thymine
  modified_base 16: mod_base = OTHER; note = thymine
  misc_feature 1..16: note = Antisense oligonucleotide
  modified_base 1: mod_base = OTHER; note = misc_feature - bicyclic nucleic acid scaffold modification
  modified_base 15..16: mod_base = OTHER; note = misc_feature - bicyclic nucleic acid scaffold modification
  source 1..16: mol_type = other RNA
tctcaggaatttgtgt

SEQ ID NO: 1990 - RNA, 16 nt, synthetic construct
  modified_base 1: mod_base = OTHER; note = thymine
  modified_base 16: mod_base = OTHER; note = thymine
  misc_feature 1..16: note = Antisense oligonucleotide
  modified_base 1: mod_base = OTHER; note = misc_feature - bicyclic nucleic acid scaffold modification
  modified_base 13: mod_base = OTHER; note = misc_feature - bicyclic nucleic acid scaffold modification
  modified_base 16: mod_base = OTHER; note = misc_feature - bicyclic nucleic acid scaffold modification
  source 1..16: mol_type = other RNA
tctcaggaatttgtgt

SEQ ID NO: 1991 - RNA, 16 nt, synthetic construct
  modified_base 1: mod_base = OTHER; note = thymine
  modified_base 16: mod_base = OTHER; note = thymine
  misc_feature 1..16: note = Antisense oligonucleotide
  modified_base 1: mod_base = OTHER; note = misc_feature - bicyclic nucleic acid scaffold modification
  modified_base 7: mod_base = OTHER; note = misc_feature - bicyclic nucleic acid scaffold modification
  modified_base 16: mod_base = OTHER; note = misc_feature - bicyclic nucleic acid scaffold modification
  source 1..16: mol_type = other RNA
tctcaggaatttgtgt

SEQ ID NO: 1992 - RNA, 16 nt, synthetic construct
  modified_base 1: mod_base = OTHER; note = thymine
  modified_base 16: mod_base = OTHER; note = thymine
  misc_feature 1..16: note = Antisense oligonucleotide
  modified_base 1: mod_base = OTHER; note = misc_feature - bicyclic nucleic acid scaffold modification
  modified_base 6: mod_base = OTHER; note = misc_feature - bicyclic nucleic acid scaffold modification
  modified_base 16: mod_base = OTHER; note = misc_feature - bicyclic nucleic acid scaffold modification
  source 1..16: mol_type = other RNA
tctcaggaatttgtgt

SEQ ID NO: 1993 - RNA, 16 nt, synthetic construct
  modified_base 1: mod_base = OTHER; note = thymine
  modified_base 16: mod_base = OTHER; note = thymine
  misc_feature 1..16: note = Antisense oligonucleotide
  modified_base 1: mod_base = OTHER; note = misc_feature - bicyclic nucleic acid scaffold modification
  modified_base 4: mod_base = OTHER; note = misc_feature - bicyclic nucleic acid scaffold modification
  modified_base 16: mod_base = OTHER; note = misc_feature - bicyclic nucleic acid scaffold modification
  source 1..16: mol_type = other RNA
tctcaggaatttgtgt

SEQ ID NO: 1994 - RNA, 16 nt, synthetic construct
  modified_base 1: mod_base = OTHER; note = thymine
  modified_base 16: mod_base = OTHER; note = thymine
  misc_feature 1..16: note = Antisense oligonucleotide
  modified_base 1..2: mod_base = OTHER; note = misc_feature - bicyclic nucleic acid scaffold modification
  modified_base 16: mod_base = OTHER; note = misc_feature - bicyclic nucleic acid scaffold modification
  source 1..16: mol_type = other RNA
tctcaggaatttgtgt

SEQ ID NO: 1995 - RNA, 16 nt, synthetic construct
  modified_base 1: mod_base = OTHER; note = thymine
  modified_base 16: mod_base = OTHER; note = thymine
  misc_feature 1..16: note = Antisense oligonucleotide
  modified_base 1..2: mod_base = OTHER; note = misc_feature - bicyclic nucleic acid scaffold modification
  modified_base 4: mod_base = OTHER; note = misc_feature - bicyclic nucleic acid scaffold modification
  modified_base 16: mod_base = OTHER; note = misc_feature - bicyclic nucleic acid scaffold modification
  source 1..16: mol_type = other RNA
tctcaggaatttgtgt

SEQ ID NO: 1996 - RNA, 16 nt, synthetic construct
  modified_base 1: mod_base = OTHER; note = thymine
  modified_base 16: mod_base = OTHER; note = thymine
  misc_feature 1..16: note = Antisense oligonucleotide
  modified_base 1: mod_base = OTHER; note = misc_feature - bicyclic nucleic acid scaffold modification
  modified_base 13: mod_base = OTHER; note = misc_feature - bicyclic nucleic acid scaffold modification
  modified_base 15..16: mod_base = OTHER; note = misc_feature - bicyclic nucleic acid scaffold modification
  source 1..16: mol_type = other RNA
tctcaggaatttgtgt

SEQ ID NO: 1997 - RNA, 16 nt, synthetic construct
  modified_base 1: mod_base = OTHER; note = thymine
  modified_base 16: mod_base = OTHER; note = thymine
  misc_feature 1..16: note = Antisense oligonucleotide
  modified_base 1: mod_base = OTHER; note = misc_feature - bicyclic nucleic acid scaffold modification
  modified_base 7: mod_base = OTHER; note = misc_feature - bicyclic nucleic acid scaffold modification
  modified_base 13: mod_base = OTHER; note = misc_feature - bicyclic nucleic acid scaffold modification
  modified_base 15..16: mod_base = OTHER; note = misc_feature - bicyclic nucleic acid scaffold modification
  source 1..16: mol_type = other RNA
tctcaggaatttgtgt

SEQ ID NO: 1998 - RNA, 16 nt, synthetic construct
  modified_base 1: mod_base = OTHER; note = thymine
  modified_base 16: mod_base = OTHER; note = thymine
  misc_feature 1..16: note = Antisense oligonucleotide
  modified_base 1: mod_base = OTHER; note = misc_feature - bicyclic nucleic acid scaffold modification
  modified_base 6..7: mod_base = OTHER; note = misc_feature - bicyclic nucleic acid scaffold modification
  modified_base 13: mod_base = OTHER; note = misc_feature - bicyclic nucleic acid scaffold modification
  modified_base 15..16: mod_base = OTHER; note = misc_feature - bicyclic nucleic acid scaffold modification
  source 1..16: mol_type = other RNA
tctcaggaatttgtgt

SEQ ID NO: 1999 - RNA, 16 nt, synthetic construct
  modified_base 1: mod_base = OTHER; note = thymine
  modified_base 16: mod_base = OTHER; note = thymine
  misc_feature 1..16: note = Antisense oligonucleotide
  modified_base 1: mod_base = OTHER; note = misc_feature - bicyclic nucleic acid scaffold modification
  modified_base 4: mod_base = OTHER; note = misc_feature - bicyclic nucleic acid scaffold modification
  modified_base 7: mod_base = OTHER; note = misc_feature - bicyclic nucleic acid scaffold modification
  modified_base 13: mod_base = OTHER; note = misc_feature - bicyclic nucleic acid scaffold modification
  modified_base 16: mod_base = OTHER; note = misc_feature - bicyclic nucleic acid scaffold modification
  source 1..16: mol_type = other RNA
tctcaggaatttgtgt

SEQ ID NO: 2000 - RNA, 16 nt, synthetic construct
  misc_feature 1..16: note = Antisense oligonucleotide
  modified_base 1: mod_base = OTHER; note = misc_feature - bicyclic nucleic acid scaffold modification
  modified_base 16: mod_base = OTHER; note = misc_feature - bicyclic nucleic acid scaffold modification
  source 1..16: mol_type = other RNA
ctcaggaatttgtgtc

SEQ ID NO: 2001 - RNA, 16 nt, synthetic construct
  misc_feature 1..16: note = Antisense oligonucleotide
  modified_base 1: mod_base = OTHER; note = misc_feature - bicyclic nucleic acid scaffold modification
  modified_base 14: mod_base = OTHER; note = misc_feature - bicyclic nucleic acid scaffold modification
  modified_base 16: mod_base = OTHER; note = misc_feature - bicyclic nucleic acid scaffold modification
  source 1..16: mol_type = other RNA
ctcaggaatttgtgtc

SEQ ID NO: 2002 - RNA, 16 nt, synthetic construct
  misc_feature 1..16: note = Antisense oligonucleotide
  modified_base 1: mod_base = OTHER; note = misc_feature - bicyclic nucleic acid scaffold modification
  modified_base 12: mod_base = OTHER; note = misc_feature - bicyclic nucleic acid scaffold modification
  modified_base 16: mod_base = OTHER; note = misc_feature - bicyclic nucleic acid scaffold modification
  source 1..16: mol_type = other RNA
ctcaggaatttgtgtc

SEQ ID NO: 2003 - RNA, 16 nt, synthetic construct
  misc_feature 1..16: note = Antisense oligonucleotide
  modified_base 1: mod_base = OTHER; note = misc_feature - bicyclic nucleic acid scaffold modification
  modified_base 6: mod_base = OTHER; note = misc_feature - bicyclic nucleic acid scaffold modification
  modified_base 16: mod_base = OTHER; note = misc_feature - bicyclic nucleic acid scaffold modification
  source 1..16: mol_type = other RNA
ctcaggaatttgtgtc

SEQ ID NO: 2004 - RNA, 16 nt, synthetic construct
  misc_feature 1..16: note = Antisense oligonucleotide
  modified_base 1: mod_base = OTHER; note = misc_feature - bicyclic nucleic acid scaffold modification
  modified_base 5: mod_base = OTHER; note = misc_feature - bicyclic nucleic acid scaffold modification
  modified_base 16: mod_base = OTHER; note = misc_feature - bicyclic nucleic acid scaffold modification
  source 1..16: mol_type = other RNA
ctcaggaatttgtgtc

SEQ ID NO: 2005 - RNA, 16 nt, synthetic construct
  misc_feature 1..16: note = Antisense oligonucleotide
  modified_base 1: mod_base = OTHER; note = misc_feature - bicyclic nucleic acid scaffold modification
  modified_base 3: mod_base = OTHER; note = misc_feature - bicyclic nucleic acid scaffold modification
  modified_base 16: mod_base = OTHER; note = misc_feature - bicyclic nucleic acid scaffold modification
  source 1..16: mol_type = other RNA
ctcaggaatttgtgtc

SEQ ID NO: 2006 - RNA, 16 nt, synthetic construct
  misc_feature 1..16: note = Antisense oligonucleotide
  modified_base 1: mod_base = OTHER; note = misc_feature - bicyclic nucleic acid scaffold modification
  modified_base 3: mod_base = OTHER; note = misc_feature - bicyclic nucleic acid scaffold modification
  modified_base 14: mod_base = OTHER; note = misc_feature - bicyclic nucleic acid scaffold modification
  modified_base 16: mod_base = OTHER; note = misc_feature - bicyclic nucleic acid scaffold modification
  source 1..16: mol_type = other RNA
ctcaggaatttgtgtc

SEQ ID NO: 2007 - RNA, 16 nt, synthetic construct
  misc_feature 1..16: note = Antisense oligonucleotide
  modified_base 1: mod_base = OTHER; note = misc_feature - bicyclic nucleic acid scaffold modification
  modified_base 5: mod_base = OTHER; note = misc_feature - bicyclic nucleic acid scaffold modification
  modified_base 12: mod_base = OTHER; note = misc_feature - bicyclic nucleic acid scaffold modification
  modified_base 14: mod_base = OTHER; note = misc_feature - bicyclic nucleic acid scaffold modification
  modified_base 16: mod_base = OTHER; note = misc_feature - bicyclic nucleic acid scaffold modification
  source 1..16: mol_type = other RNA
ctcaggaatttgtgtc

SEQ ID NO: 2008 - RNA, 16 nt, synthetic construct
  modified_base 2: mod_base = OTHER; note = thymine
  modified_base 15: mod_base = OTHER; note = thymine
  misc_feature 1..16: note = Antisense oligonucleotide
  modified_base 1..2: mod_base = OTHER; note = misc_feature - bicyclic nucleic acid scaffold modification
  modified_base 15..16: mod_base = OTHER; note = misc_feature - bicyclic nucleic acid scaffold modification
  source 1..16: mol_type = other RNA
ctcaggaatttgtgtc

SEQ ID NO: 2009 - RNA, 16 nt, synthetic construct
  misc_feature 1..16: note = Antisense oligonucleotide
  modified_base 1: mod_base = OTHER; note = misc_feature - bicyclic nucleic acid scaffold modification
  modified_base 3: mod_base = OTHER; note = misc_feature - bicyclic nucleic acid scaffold modification
  modified_base 12: mod_base = OTHER; note = misc_feature - bicyclic nucleic acid scaffold modification
  modified_base 14: mod_base = OTHER; note = misc_feature - bicyclic nucleic acid scaffold modification
  modified_base 16: mod_base = OTHER; note = misc_feature - bicyclic nucleic acid scaffold modification
  source 1..16: mol_type = other RNA
ctcaggaatttgtgtc

SEQ ID NO: 2010 - RNA, 16 nt, synthetic construct
  misc_feature 1..16: note = Antisense oligonucleotide
  modified_base 1: mod_base = OTHER; note = misc_feature - bicyclic nucleic acid scaffold modification
  modified_base 3: mod_base = OTHER; note = misc_feature - bicyclic nucleic acid scaffold modification
  modified_base 6: mod_base = OTHER; note = misc_feature - bicyclic nucleic acid scaffold modification
  modified_base 12: mod_base = OTHER; note = misc_feature - bicyclic nucleic acid scaffold modification
  modified_base 14: mod_base = OTHER; note = misc_feature - bicyclic nucleic acid scaffold modification
  modified_base 16: mod_base = OTHER; note = misc_feature - bicyclic nucleic acid scaffold modification
  source 1..16: mol_type = other RNA
ctcaggaatttgtgtc

SEQ ID NO: 2011 - RNA, 16 nt, synthetic construct
  modified_base 1: mod_base = OTHER; note = thymine
  modified_base 16: mod_base = OTHER; note = thymine
  misc_feature 1..16: note = Antisense oligonucleotide
  modified_base 1: mod_base = OTHER; note = misc_feature - bicyclic nucleic acid scaffold modification
  modified_base 16: mod_base = OTHER; note = misc_feature - bicyclic nucleic acid scaffold modification
  source 1..16: mol_type = other RNA
tcaggaatttgtgtct

SEQ ID NO: 2012 - RNA, 16 nt, synthetic construct
  modified_base 1: mod_base = OTHER; note = thymine
  modified_base 16: mod_base = OTHER; note = thymine
  misc_feature 1..16: note = Antisense oligonucleotide
  modified_base 1..2: mod_base = OTHER; note = misc_feature - bicyclic nucleic acid scaffold modification
  modified_base 16: mod_base = OTHER; note = misc_feature - bicyclic nucleic acid scaffold modification
  source 1..16: mol_type = other RNA
tcaggaatttgtgtct

SEQ ID NO: 2013 - RNA, 16 nt, synthetic construct
  modified_base 1: mod_base = OTHER; note = thymine
  modified_base 16: mod_base = OTHER; note = thymine
  misc_feature 1..16: note = Antisense oligonucleotide
  modified_base 1: mod_base = OTHER; note = misc_feature - bicyclic nucleic acid scaffold modification
  modified_base 4: mod_base = OTHER; note = misc_feature - bicyclic nucleic acid scaffold modification
  modified_base 16: mod_base = OTHER; note = misc_feature - bicyclic nucleic acid scaffold modification
  source 1..16: mol_type = other RNA
tcaggaatttgtgtct

SEQ ID NO: 2014 - RNA, 16 nt, synthetic construct
  modified_base 1: mod_base = OTHER; note = thymine
  modified_base 16: mod_base = OTHER; note = thymine
  misc_feature 1..16: note = Antisense oligonucleotide
  modified_base 1: mod_base = OTHER; note = misc_feature - bicyclic nucleic acid scaffold modification
  modified_base 5: mod_base = OTHER; note = misc_feature - bicyclic nucleic acid scaffold modification
  modified_base 16: mod_base = OTHER; note = misc_feature - bicyclic nucleic acid scaffold modification
  source 1..16: mol_type = other RNA
tcaggaatttgtgtct

SEQ ID NO: 2015 - RNA, 16 nt, synthetic construct
  modified_base 1: mod_base = OTHER; note = thymine
  modified_base 16: mod_base = OTHER; note = thymine
  misc_feature 1..16: note = Antisense oligonucleotide
  modified_base 1: mod_base = OTHER; note = misc_feature - bicyclic nucleic acid scaffold modification
  modified_base 11: mod_base = OTHER; note = misc_feature - bicyclic nucleic acid scaffold modification
  modified_base 16: mod_base = OTHER; note = misc_feature - bicyclic nucleic acid scaffold modification
  source 1..16: mol_type = other RNA
tcaggaatttgtgtct

SEQ ID NO: 2016 - RNA, 16 nt, synthetic construct
  modified_base 1: mod_base = OTHER; note = thymine
  modified_base 16: mod_base = OTHER; note = thymine
  misc_feature 1..16: note = Antisense oligonucleotide
  modified_base 1: mod_base = OTHER; note = misc_feature - bicyclic nucleic acid scaffold modification
  modified_base 13: mod_base = OTHER; note = misc_feature - bicyclic nucleic acid scaffold modification
  modified_base 16: mod_base = OTHER; note = misc_feature - bicyclic nucleic acid scaffold modification
  source 1..16: mol_type = other RNA
tcaggaatttgtgtct

SEQ ID NO: 2017 - RNA, 16 nt, synthetic construct
  modified_base 1: mod_base = OTHER; note = thymine
  modified_base 16: mod_base = OTHER; note = thymine
  misc_feature 1..16: note = Antisense oligonucleotide
  modified_base 1: mod_base = OTHER; note = misc_feature - bicyclic nucleic acid scaffold modification
  modified_base 15..16: mod_base = OTHER; note = misc_feature - bicyclic nucleic acid scaffold modification
  source 1..16: mol_type = other RNA
tcaggaatttgtgtct

SEQ ID NO: 2018 - RNA, 16 nt, synthetic construct
  modified_base 1: mod_base = OTHER; note = thymine
  modified_base 16: mod_base = OTHER; note = thymine
  misc_feature 1..16: note = Antisense oligonucleotide
  modified_base 1..2: mod_base = OTHER; note = misc_feature - bicyclic nucleic acid scaffold modification
  modified_base 15..16: mod_base = OTHER; note = misc_feature - bicyclic nucleic acid scaffold modification
  source 1..16: mol_type = other RNA
tcaggaatttgtgtct

SEQ ID NO: 2019 - RNA, 16 nt, synthetic construct
  modified_base 1: mod_base = OTHER; note = thymine
  modified_base 16: mod_base = OTHER; note = thymine
  misc_feature 1..16: note = Antisense oligonucleotide
  modified_base 1: mod_base = OTHER; note = misc_feature - bicyclic nucleic acid scaffold modification
  modified_base 4: mod_base = OTHER; note = misc_feature - bicyclic nucleic acid scaffold modification
  modified_base 13: mod_base = OTHER; note = misc_feature - bicyclic nucleic acid scaffold modification
  modified_base 16: mod_base = OTHER; note = misc_feature - bicyclic nucleic acid scaffold modification
  source 1..16: mol_type = other RNA
tcaggaatttgtgtct

SEQ ID NO: 2020 - RNA, 16 nt, synthetic construct
  modified_base 1: mod_base = OTHER; note = thymine
  modified_base 16: mod_base = OTHER; note = thymine
  misc_feature 1..16: note = Antisense oligonucleotide
  modified_base 1: mod_base = OTHER; note = misc_feature - bicyclic nucleic acid scaffold modification
  modified_base 11: mod_base = OTHER; note = misc_feature - bicyclic nucleic acid scaffold modification
  modified_base 13: mod_base = OTHER; note = misc_feature - bicyclic nucleic acid scaffold modification
  modified_base 16: mod_base = OTHER; note = misc_feature - bicyclic nucleic acid scaffold modification
  source 1..16: mol_type = other RNA
tcaggaatttgtgtct

SEQ ID NO: 2021 - RNA, 16 nt, synthetic construct
  modified_base 1: mod_base = OTHER; note = thymine
  modified_base 16: mod_base = OTHER; note = thymine
  misc_feature 1..16: note = Antisense oligonucleotide
  modified_base 1: mod_base = OTHER; note = misc_feature - bicyclic nucleic acid scaffold modification
  modified_base 4..5: mod_base = OTHER; note = misc_feature - bicyclic nucleic acid scaffold modification
  modified_base 11: mod_base = OTHER; note = misc_feature - bicyclic nucleic acid scaffold modification
  modified_base 13: mod_base = OTHER; note = misc_feature - bicyclic nucleic acid scaffold modification
  modified_base 16: mod_base = OTHER; note = misc_feature - bicyclic nucleic acid scaffold modification
  source 1..16: mol_type = other RNA
tcaggaatttgtgtct

SEQ ID NO: 2022 - RNA, 16 nt, synthetic construct
  modified_base 16: mod_base = OTHER; note = thymine
  misc_feature 1..16: note = Antisense oligonucleotide
  modified_base 1: mod_base = OTHER; note = misc_feature - bicyclic nucleic acid scaffold modification
  modified_base 16: mod_base = OTHER; note = misc_feature - bicyclic nucleic acid scaffold modification
  source 1..16: mol_type = other RNA
caggaatttgtgtctt

SEQ ID NO: 2023 - RNA, 16 nt, synthetic construct
  modified_base 16: mod_base = OTHER; note = thymine
  misc_feature 1..16: note = Antisense oligonucleotide
  modified_base 1: mod_base = OTHER; note = misc_feature - bicyclic nucleic acid scaffold modification
  modified_base 3: mod_base = OTHER; note = misc_feature - bicyclic nucleic acid scaffold modification
  modified_base 16: mod_base = OTHER; note = misc_feature - bicyclic nucleic acid scaffold modification
  source 1..16: mol_type = other RNA
caggaatttgtgtctt

SEQ ID NO: 2024 - RNA, 16 nt, synthetic construct
  modified_base 16: mod_base = OTHER; note = thymine
  misc_feature 1..16: note = Antisense oligonucleotide
  modified_base 1: mod_base = OTHER; note = misc_feature - bicyclic nucleic acid scaffold modification
  modified_base 4: mod_base = OTHER; note = misc_feature - bicyclic nucleic acid scaffold modification
  modified_base 16: mod_base = OTHER; note = misc_feature - bicyclic nucleic acid scaffold modification
  source 1..16: mol_type = other RNA
caggaatttgtgtctt

SEQ ID NO: 2025 - RNA, 16 nt, synthetic construct
  modified_base 16: mod_base = OTHER; note = thymine
  misc_feature 1..16: note = Antisense oligonucleotide
  modified_base 1: mod_base = OTHER; note = misc_feature - bicyclic nucleic acid scaffold modification
  modified_base 10: mod_base = OTHER; note = misc_feature - bicyclic nucleic acid scaffold modification
  modified_base 16: mod_base = OTHER; note = misc_feature - bicyclic nucleic acid scaffold modification
  source 1..16: mol_type = other RNA
caggaatttgtgtctt

SEQ ID NO: 2026 - RNA, 16 nt, synthetic construct
  modified_base 16: mod_base = OTHER; note = thymine
  misc_feature 1..16: note = Antisense oligonucleotide
  modified_base 1: mod_base = OTHER; note = misc_feature - bicyclic nucleic acid scaffold modification
  modified_base 12: mod_base = OTHER; note = misc_feature - bicyclic nucleic acid scaffold modification
  modified_base 16: mod_base = OTHER; note = misc_feature - bicyclic nucleic acid scaffold modification
  source 1..16: mol_type = other RNA
caggaatttgtgtctt

SEQ ID NO: 2027 - RNA, 16 nt, synthetic construct
  modified_base 16: mod_base = OTHER; note = thymine
  misc_feature 1..16: note = Antisense oligonucleotide
  modified_base 1: mod_base = OTHER; note = misc_feature - bicyclic nucleic acid scaffold modification
  modified_base 14: mod_base = OTHER; note = misc_feature - bicyclic nucleic acid scaffold modification
  modified_base 16: mod_base = OTHER; note = misc_feature - bicyclic nucleic acid scaffold modification
  source 1..16: mol_type = other RNA
caggaatttgtgtctt

SEQ ID NO: 2028 - RNA, 16 nt, synthetic construct
  modified_base 16: mod_base = OTHER; note = thymine
  misc_feature 1..16: note = Antisense oligonucleotide
  modified_base 1: mod_base = OTHER; note = misc_feature - bicyclic nucleic acid scaffold modification
  modified_base 4: mod_base = OTHER; note = misc_feature - bicyclic nucleic acid scaffold modification
  modified_base 10: mod_base = OTHER; note = misc_feature - bicyclic nucleic acid scaffold modification
  modified_base 16: mod_base = OTHER; note = misc_feature - bicyclic nucleic acid scaffold modification
  source 1..16: mol_type = other RNA
caggaatttgtgtctt

SEQ ID NO: 2029 - RNA, 16 nt, synthetic construct
  modified_base 16: mod_base = OTHER; note = thymine
  misc_feature 1..16: note = Antisense oligonucleotide
  modified_base 1: mod_base = OTHER; note = misc_feature - bicyclic nucleic acid scaffold modification
  modified_base 10: mod_base = OTHER; note = misc_feature - bicyclic nucleic acid scaffold modification
  modified_base 12: mod_base = OTHER; note = misc_feature - bicyclic nucleic acid scaffold modification
  modified_base 16: mod_base = OTHER; note = misc_feature - bicyclic nucleic acid scaffold modification
  source 1..16: mol_type = other RNA
caggaatttgtgtctt

SEQ ID NO: 2030 - RNA, 16 nt, synthetic construct
  modified_base 16: mod_base = OTHER; note = thymine
  misc_feature 1..16: note = Antisense oligonucleotide
  modified_base 1: mod_base = OTHER; note = misc_feature - bicyclic nucleic acid scaffold modification
  modified_base 10: mod_base = OTHER; note = misc_feature - bicyclic nucleic acid scaffold modification
  modified_base 12: mod_base = OTHER; note = misc_feature - bicyclic nucleic acid scaffold modification
  modified_base 14: mod_base = OTHER; note = misc_feature - bicyclic nucleic acid scaffold modification
  modified_base 16: mod_base = OTHER; note = misc_feature - bicyclic nucleic acid scaffold modification
  source 1..16: mol_type = other RNA
caggaatttgtgtctt

SEQ ID NO: 2031 - RNA, 16 nt, synthetic construct
  modified_base 16: mod_base = OTHER; note = thymine
  misc_feature 1..16: note = Antisense oligonucleotide
  modified_base 1: mod_base = OTHER; note = misc_feature - bicyclic nucleic acid scaffold modification
  modified_base 3..4: mod_base = OTHER; note = misc_feature - bicyclic nucleic acid scaffold modification
  modified_base 10: mod_base = OTHER; note = misc_feature - bicyclic nucleic acid scaffold modification
  modified_base 12: mod_base = OTHER; note = misc_feature - bicyclic nucleic acid scaffold modification
  modified_base 16: mod_base = OTHER; note = misc_feature - bicyclic nucleic acid scaffold modification
  source 1..16: mol_type = other RNA
caggaatttgtgtctt

SEQ ID NO: 2032 - RNA, 16 nt, synthetic construct
  modified_base 15..16: mod_base = OTHER; note = thymine
  misc_feature 1..16: note = Antisense oligonucleotide
  modified_base 1..2: mod_base = OTHER; note = misc_feature - bicyclic nucleic acid scaffold modification
  modified_base 4: mod_base = OTHER; note = misc_feature - bicyclic nucleic acid scaffold modification
  modified_base 10: mod_base = OTHER; note = misc_feature - bicyclic nucleic acid scaffold modification
  modified_base 15..16: mod_base = OTHER; note = misc_feature - bicyclic nucleic acid scaffold modification
  source 1..16: mol_type = other RNA
caggaatttgtgtctt

SEQ ID NO: 2033 - RNA, 16 nt, synthetic construct
  modified_base 16: mod_base = OTHER; note = thymine
  misc_feature 1..16: note = Antisense oligonucleotide
  modified_base 1: mod_base = OTHER; note = misc_feature - bicyclic nucleic acid scaffold modification
  modified_base 16: mod_base = OTHER; note = misc_feature - bicyclic nucleic acid scaffold modification
  source 1..16: mol_type = other RNA
aggaatttgtgtcttt

SEQ ID NO: 2034 - RNA, 16 nt, synthetic construct
  modified_base 16: mod_base = OTHER; note = thymine
  misc_feature 1..16: note = Antisense oligonucleotide
  modified_base 1: mod_base = OTHER; note = misc_feature - bicyclic nucleic acid scaffold modification
  modified_base 13: mod_base = OTHER; note = misc_feature - bicyclic nucleic acid scaffold modification
  modified_base 16: mod_base = OTHER; note = misc_feature - bicyclic nucleic acid scaffold modification
  source 1..16: mol_type = other RNA
aggaatttgtgtcttt

SEQ ID NO: 2035 - RNA, 16 nt, synthetic construct
  modified_base 16: mod_base = OTHER; note = thymine
  misc_feature 1..16: note = Antisense oligonucleotide
  modified_base 1: mod_base = OTHER; note = misc_feature - bicyclic nucleic acid scaffold modification
  modified_base 11: mod_base = OTHER; note = misc_feature - bicyclic nucleic acid scaffold modification
  modified_base 16: mod_base = OTHER; note = misc_feature - bicyclic nucleic acid scaffold modification
  source 1..16: mol_type = other RNA
aggaatttgtgtcttt

SEQ ID NO: 2036 - RNA, 16 nt, synthetic construct
  modified_base 16: mod_base = OTHER; note = thymine
  misc_feature 1..16: note = Antisense oligonucleotide
  modified_base 1: mod_base = OTHER; note = misc_feature - bicyclic nucleic acid scaffold modification
  modified_base 9: mod_base = OTHER; note = misc_feature - bicyclic nucleic acid scaffold modification
  modified_base 16: mod_base = OTHER; note = misc_feature - bicyclic nucleic acid scaffold modification
  source 1..16: mol_type = other RNA
aggaatttgtgtcttt

SEQ ID NO: 2037 - RNA, 16 nt, synthetic construct
  modified_base 16: mod_base = OTHER; note = thymine
  misc_feature 1..16: note = Antisense oligonucleotide
  modified_base 1: mod_base = OTHER; note = misc_feature - bicyclic nucleic acid scaffold modification
  modified_base 3: mod_base = OTHER; note = misc_feature - bicyclic nucleic acid scaffold modification
  modified_base 16: mod_base = OTHER; note = misc_feature - bicyclic nucleic acid scaffold modification
  source 1..16: mol_type = other RNA
aggaatttgtgtcttt

SEQ ID NO: 2038 - RNA, 16 nt, synthetic construct
  modified_base 16: mod_base = OTHER; note = thymine
  misc_feature 1..16: note = Antisense oligonucleotide
  modified_base 1..2: mod_base = OTHER; note = misc_feature - bicyclic nucleic acid scaffold modification
  modified_base 16: mod_base = OTHER; note = misc_feature - bicyclic nucleic acid scaffold modification
  source 1..16: mol_type = other RNA
aggaatttgtgtcttt

SEQ ID NO: 2039 - RNA, 16 nt, synthetic construct
  modified_base 16: mod_base = OTHER; note = thymine
  misc_feature 1..16: note = Antisense oligonucleotide
  modified_base 1: mod_base = OTHER; note = misc_feature - bicyclic nucleic acid scaffold modification
  modified_base 3: mod_base = OTHER; note = misc_feature - bicyclic nucleic acid scaffold modification
  modified_base 11: mod_base = OTHER; note = misc_feature - bicyclic nucleic acid scaffold modification
  modified_base 16: mod_base = OTHER; note = misc_feature - bicyclic nucleic acid scaffold modification
  source 1..16: mol_type = other RNA
aggaatttgtgtcttt

SEQ ID NO: 2040 - RNA, 16 nt, synthetic construct
  modified_base 16: mod_base = OTHER; note = thymine
  misc_feature 1..16: note = Antisense oligonucleotide
  modified_base 1: mod_base = OTHER; note = misc_feature - bicyclic nucleic acid scaffold modification
  modified_base 9: mod_base = OTHER; note = misc_feature - bicyclic nucleic acid scaffold modification
  modified_base 11: mod_base = OTHER; note = misc_feature - bicyclic nucleic acid scaffold modification
  modified_base 16: mod_base = OTHER; note = misc_feature - bicyclic nucleic acid scaffold modification
  source 1..16: mol_type = other RNA
aggaatttgtgtcttt

SEQ ID NO: 2041 - RNA, 16 nt, synthetic construct
  modified_base 16: mod_base = OTHER; note = thymine
  misc_feature 1..16: note = Antisense oligonucleotide
  modified_base 1: mod_base = OTHER; note = misc_feature - bicyclic nucleic acid scaffold modification
  modified_base 3: mod_base = OTHER; note = misc_feature - bicyclic nucleic acid scaffold modification
  modified_base 9: mod_base = OTHER; note = misc_feature - bicyclic nucleic acid scaffold modification
  modified_base 11: mod_base = OTHER; note = misc_feature - bicyclic nucleic acid scaffold modification
  modified_base 16: mod_base = OTHER; note = misc_feature - bicyclic nucleic acid scaffold modification
  source 1..16: mol_type = other RNA
aggaatttgtgtcttt

SEQ ID NO: 2042 - RNA, 16 nt, synthetic construct
  modified_base 16: mod_base = OTHER; note = thymine
  misc_feature 1..16: note = Antisense oligonucleotide
  modified_base 1: mod_base = OTHER; note = misc_feature - bicyclic nucleic acid scaffold modification
  modified_base 3: mod_base = OTHER; note = misc_feature - bicyclic nucleic acid scaffold modification
  modified_base 9: mod_base = OTHER; note = misc_feature - bicyclic nucleic acid scaffold modification
  modified_base 13: mod_base = OTHER; note = misc_feature - bicyclic nucleic acid scaffold modification
  modified_base 16: mod_base = OTHER; note = misc_feature - bicyclic nucleic acid scaffold modification
  source 1..16: mol_type = other RNA
aggaatttgtgtcttt

SEQ ID NO: 2043 - RNA, 16 nt, synthetic construct
  modified_base 15..16: mod_base = OTHER; note = thymine
  misc_feature 1..16: note = Antisense oligonucleotide
  modified_base 1..2: mod_base = OTHER; note = misc_feature - bicyclic nucleic acid scaffold modification
  modified_base 9: mod_base = OTHER; note = misc_feature - bicyclic nucleic acid scaffold modification
  modified_base 11: mod_base = OTHER; note = misc_feature - bicyclic nucleic acid scaffold modification
  modified_base 15..16: mod_base = OTHER; note = misc_feature - bicyclic nucleic acid scaffold modification
  source 1..16: mol_type = other RNA
aggaatttgtgtcttt

SEQ ID NO: 2044 - RNA, 16 nt, synthetic construct
  modified_base 15..16: mod_base = OTHER; note = thymine
  misc_feature 1..16: note = Antisense oligonucleotide
  modified_base 1..2: mod_base = OTHER; note = misc_feature - bicyclic nucleic acid scaffold modification
  modified_base 15..16: mod_base = OTHER; note = misc_feature - bicyclic nucleic acid scaffold modification
  source 1..16: mol_type = other RNA
aggaatttgtgtcttt

SEQ ID NO: 2045 - RNA, 16 nt, synthetic construct
  misc_feature 1..16: note = Antisense oligonucleotide
  modified_base 1: mod_base = OTHER; note = misc_feature - bicyclic nucleic acid scaffold modification
  modified_base 16: mod_base = OTHER; note = misc_feature - bicyclic nucleic acid scaffold modification
  source 1..16: mol_type = other RNA
ggaatttgtgtctttc

SEQ ID NO: 2046 - RNA, 16 nt, synthetic construct
  misc_feature 1..16: note = Antisense oligonucleotide
  modified_base 1: mod_base = OTHER; note = misc_feature - bicyclic nucleic acid scaffold modification
  modified_base 12: mod_base = OTHER; note = misc_feature - bicyclic nucleic acid scaffold modification
  modified_base 16: mod_base = OTHER; note = misc_feature - bicyclic nucleic acid scaffold modification
  source 1..16: mol_type = other RNA
ggaatttgtgtctttc

SEQ ID NO: 2047 - RNA, 16 nt, synthetic construct
  misc_feature 1..16: note = Antisense oligonucleotide
  modified_base 1: mod_base = OTHER; note = misc_feature - bicyclic nucleic acid scaffold modification
  modified_base 10: mod_base = OTHER; note = misc_feature - bicyclic nucleic acid scaffold modification
  modified_base 16: mod_base = OTHER; note = misc_feature - bicyclic nucleic acid scaffold modification
  source 1..16: mol_type = other RNA
ggaatttgtgtctttc

SEQ ID NO: 2048 - RNA, 16 nt, synthetic construct
  misc_feature 1..16: note = Antisense oligonucleotide
  modified_base 1: mod_base = OTHER; note = misc_feature - bicyclic nucleic acid scaffold modification
  modified_base 8: mod_base = OTHER; note = misc_feature - bicyclic nucleic acid scaffold modification
  modified_base 16: mod_base = OTHER; note = misc_feature - bicyclic nucleic acid scaffold modification
  source 1..16: mol_type = other RNA
ggaatttgtgtctttc

SEQ ID NO: 2049 - RNA, 16 nt, synthetic construct
  misc_feature 1..16: note = Antisense oligonucleotide
  modified_base 1..2: mod_base = OTHER; note = misc_feature - bicyclic nucleic acid scaffold modification
  modified_base 16: mod_base = OTHER; note = misc_feature - bicyclic nucleic acid scaffold modification
  source 1..16: mol_type = other RNA
ggaatttgtgtctttc

SEQ ID NO: 2050 - RNA, 16 nt, synthetic construct
  misc_feature 1..16: note = Antisense oligonucleotide
  modified_base 1: mod_base = OTHER; note = misc_feature - bicyclic nucleic acid scaffold modification
  modified_base 8: mod_base = OTHER; note = misc_feature - bicyclic nucleic acid scaffold modification
  modified_base 10: mod_base = OTHER; note = misc_feature - bicyclic nucleic acid scaffold modification
  modified_base 16: mod_base = OTHER; note = misc_feature - bicyclic nucleic acid scaffold modification
  source 1..16: mol_type = other RNA
ggaatttgtgtctttc

SEQ ID NO: 2051 - RNA, 16 nt, synthetic construct
  misc_feature 1..16: note = Antisense oligonucleotide
  modified_base 1: mod_base = OTHER; note = misc_feature - bicyclic nucleic acid scaffold modification
  modified_base 8: mod_base = OTHER; note = misc_feature - bicyclic nucleic acid scaffold modification
  modified_base 10: mod_base = OTHER; note = misc_feature - bicyclic nucleic acid scaffold modification
  modified_base 12: mod_base = OTHER; note = misc_feature - bicyclic nucleic acid scaffold modification
  modified_base 16: mod_base = OTHER; note = misc_feature - bicyclic nucleic acid scaffold modification
  source 1..16: mol_type = other RNA
ggaatttgtgtctttc

SEQ ID NO: 2052 - RNA, 16 nt, synthetic construct
  modified_base 15: mod_base = OTHER; note = thymine
  misc_feature 1..16: note = Antisense oligonucleotide
  modified_base 1..2: mod_base = OTHER; note = misc_feature - bicyclic nucleic acid scaffold modification
  modified_base 15..16: mod_base = OTHER; note = misc_feature - bicyclic nucleic acid scaffold modification
  source 1..16: mol_type = other RNA
ggaatttgtgtctttc

SEQ ID NO: 2053 - RNA, 16 nt, synthetic construct
  misc_feature 1..16: note = Antisense oligonucleotide
  modified_base 1: mod_base = OTHER; note = misc_feature - bicyclic nucleic acid scaffold modification
  modified_base 8: mod_base = OTHER; note = misc_feature - bicyclic nucleic acid scaffold modification
  modified_base 10: mod_base = OTHER; note = misc_feature - bicyclic nucleic acid scaffold modification
  modified_base 12: mod_base = OTHER; note = misc_feature - bicyclic nucleic acid scaffold modification
  modified_base 16: mod_base = OTHER; note = misc_feature - bicyclic nucleic acid scaffold modification
  source 1..16: mol_type = other RNA
ggaatttgtgtctttc

SEQ ID NO: 2054 - RNA, 16 nt, synthetic construct
  misc_feature 1..16: note = Antisense oligonucleotide
  modified_base 1..2: mod_base = OTHER; note = misc_feature - bicyclic nucleic acid scaffold modification
  modified_base 8: mod_base = OTHER; note = misc_feature - bicyclic nucleic acid scaffold modification
  modified_base 10: mod_base = OTHER; note = misc_feature - bicyclic nucleic acid scaffold modification
  modified_base 12: mod_base = OTHER; note = misc_feature - bicyclic nucleic acid scaffold modification
  modified_base 16: mod_base = OTHER; note = misc_feature - bicyclic nucleic acid scaffold modification
  source 1..16: mol_type = other RNA
ggaatttgtgtctttc

SEQ ID NO: 2055 - RNA, 23 nt, synthetic construct
  misc_feature 1..23: note = Antisense oligonucleotide
  modified_base 1: mod_base = OTHER; note = misc_feature - bicyclic nucleic acid scaffold modification
  modified_base 3: mod_base = OTHER; note = misc_feature - bicyclic nucleic acid scaffold modification
  modified_base 23: mod_base = OTHER; note = misc_feature - bicyclic nucleic acid scaffold modification
  source 1..23: mol_type = other RNA
gccatttctcaacagatctgtca

SEQ ID NO: 2056 - RNA, 23 nt, synthetic construct
  misc_feature 1..23: note = Antisense oligonucleotide
  modified_base 1: mod_base = OTHER; note = misc_feature - bicyclic nucleic acid scaffold modification
  modified_base 8: mod_base = OTHER; note = misc_feature - bicyclic nucleic acid scaffold modification
  modified_base 23: mod_base = OTHER; note = misc_feature - bicyclic nucleic acid scaffold modification
  source 1..23: mol_type = other RNA
gccatttctcaacagatctgtca

SEQ ID NO: 2057 - RNA, 23 nt, synthetic construct
  misc_feature 1..23: note = Antisense oligonucleotide
  modified_base 1: mod_base = OTHER; note = misc_feature - bicyclic nucleic acid scaffold modification
  modified_base 10: mod_base = OTHER; note = misc_feature - bicyclic nucleic acid scaffold modification
  modified_base 23: mod_base = OTHER; note = misc_feature - bicyclic nucleic acid scaffold modification
  source 1..23: mol_type = other RNA
gccatttctcaacagatctgtca

SEQ ID NO: 2058 - RNA, 23 nt, synthetic construct
  misc_feature 1..23: note = Antisense oligonucleotide
  modified_base 1: mod_base = OTHER; note = misc_feature - bicyclic nucleic acid scaffold modification
  modified_base 13: mod_base = OTHER; note = misc_feature - bicyclic nucleic acid scaffold modification
  modified_base 23: mod_base = OTHER; note = misc_feature - bicyclic nucleic acid scaffold modification
  source 1..23: mol_type = other RNA
gccatttctcaacagatctgtca

SEQ ID NO: 2059 - RNA, 23 nt, synthetic construct
  misc_feature 1..23: note = Antisense oligonucleotide
  modified_base 1: mod_base = OTHER; note = misc_feature - bicyclic nucleic acid scaffold modification
  modified_base 15: mod_base = OTHER; note = misc_feature - bicyclic nucleic acid scaffold modification
  modified_base 23: mod_base = OTHER; note = misc_feature - bicyclic nucleic acid scaffold modification
  source 1..23: mol_type = other RNA
gccatttctcaacagatctgtca

SEQ ID NO: 2060 - RNA, 23 nt, synthetic construct
  misc_feature 1..23: note = Antisense oligonucleotide
  modified_base 1: mod_base = OTHER; note = misc_feature - bicyclic nucleic acid scaffold modification
  modified_base 18: mod_base = OTHER; note = misc_feature - bicyclic nucleic acid scaffold modification
  modified_base 23: mod_base = OTHER; note = misc_feature - bicyclic nucleic acid scaffold modification
  source 1..23: mol_type = other RNA
gccatttctcaacagatctgtca

SEQ ID NO: 2061 - RNA, 23 nt, synthetic construct
  misc_feature 1..23: note = Antisense oligonucleotide
  modified_base 1: mod_base = OTHER; note = misc_feature - bicyclic nucleic acid scaffold modification
  modified_base 20: mod_base = OTHER; note = misc_feature - bicyclic nucleic acid scaffold modification
  modified_base 23: mod_base = OTHER; note = misc_feature - bicyclic nucleic acid scaffold modification
  source 1..23: mol_type = other RNA
gccatttctcaacagatctgtca

SEQ ID NO: 2062 - RNA, 23 nt, synthetic construct
  misc_feature 1..23: note = Antisense oligonucleotide
  modified_base 1: mod_base = OTHER; note = misc_feature - bicyclic nucleic acid scaffold modification
  modified_base 3: mod_base = OTHER; note = misc_feature - bicyclic nucleic acid scaffold modification
  modified_base 8: mod_base = OTHER; note = misc_feature - bicyclic nucleic acid scaffold modification
  modified_base 23: mod_base = OTHER; note = misc_feature - bicyclic nucleic acid scaffold modification
  source 1..23: mol_type = other RNA
gccatttctcaacagatctgtca

SEQ ID NO: 2063 - RNA, 23 nt, synthetic construct
  misc_feature 1..23: note = Antisense oligonucleotide
  modified_base 1: mod_base = OTHER; note = misc_feature - bicyclic nucleic acid scaffold modification
  modified_base 10: mod_base = OTHER; note = misc_feature - bicyclic nucleic acid scaffold modification
  modified_base 13: mod_base = OTHER; note = misc_feature - bicyclic nucleic acid scaffold modification
  modified_base 23: mod_base = OTHER; note = misc_feature - bicyclic nucleic acid scaffold modification
  source 1..23: mol_type = other RNA
gccatttctcaacagatctgtca

SEQ ID NO: 2064 - RNA, 23 nt, synthetic construct
  misc_feature 1..23: note = Antisense oligonucleotide
  modified_base 1: mod_base = OTHER; note = misc_feature - bicyclic nucleic acid scaffold modification
  modified_base 15: mod_base = OTHER; note = misc_feature - bicyclic nucleic acid scaffold modification
  modified_base 20: mod_base = OTHER; note = misc_feature - bicyclic nucleic acid scaffold modification
  modified_base 23: mod_base = OTHER; note = misc_feature - bicyclic nucleic acid scaffold modification
  source 1..23: mol_type = other RNA
gccatttctcaacagatctgtca

SEQ ID NO: 2065 - RNA, 23 nt, synthetic construct
  misc_feature 1..23: note = Antisense oligonucleotide
  modified_base 1: mod_base = OTHER; note = misc_feature - bicyclic nucleic acid scaffold modification
  modified_base 8: mod_base = OTHER; note = misc_feature - bicyclic nucleic acid scaffold modification
  modified_base 15: mod_base = OTHER; note = misc_feature - bicyclic nucleic acid scaffold modification
  modified_base 20: mod_base = OTHER; note = misc_feature - bicyclic nucleic acid scaffold modification
  modified_base 23: mod_base = OTHER; note = misc_feature - bicyclic nucleic acid scaffold modification
  source 1..23: mol_type = other RNA
gccatttctcaacagatctgtca

SEQ ID NO: 2066 - RNA, 23 nt, synthetic construct
  misc_feature 1..23: note = Antisense oligonucleotide
  modified_base 1: mod_base = OTHER; note = misc_feature - bicyclic nucleic acid scaffold modification
  modified_base 8: mod_base = OTHER; note = misc_feature - bicyclic nucleic acid scaffold modification
  modified_base 15: mod_base = OTHER; note = misc_feature - bicyclic nucleic acid scaffold modification
  modified_base 20: mod_base = OTHER; note = misc_feature - bicyclic nucleic acid scaffold modification
  modified_base 23: mod_base = OTHER; note = misc_feature - bicyclic nucleic acid scaffold modification
  source 1..23: mol_type = other RNA
gccatttctcaacagatctgtca

SEQ ID NO: 2067 - RNA, 23 nt, synthetic construct
  misc_feature 1..23: note = Antisense oligonucleotide
  modified_base 1..2: mod_base = OTHER; note = misc_feature - bicyclic nucleic acid scaffold modification
  modified_base 22..23: mod_base = OTHER; note = misc_feature - bicyclic nucleic acid scaffold modification
  source 1..23: mol_type = other RNA
gccatttctcaacagatctgtca

SEQ ID NO: 2068 - RNA, 23 nt, synthetic construct
  misc_feature 1..23: note = Antisense oligonucleotide
  modified_base 1..2: mod_base = OTHER; note = misc_feature - bicyclic nucleic acid scaffold modification
  modified_base 8: mod_base = OTHER; note = misc_feature - bicyclic nucleic acid scaffold modification
  modified_base 18: mod_base = OTHER; note = misc_feature - bicyclic nucleic acid scaffold modification
  modified_base 22..23: mod_base = OTHER; note = misc_feature - bicyclic nucleic acid scaffold modification
  source 1..23: mol_type = other RNA
gccatttctcaacagatctgtca

SEQ ID NO: 2069 - RNA, 23 nt, synthetic construct
  misc_feature 1..23: note = Antisense oligonucleotide
  modified_base 1: mod_base = OTHER; note = misc_feature - bicyclic nucleic acid scaffold modification
  modified_base 8: mod_base = OTHER; note = misc_feature - bicyclic nucleic acid scaffold modification
  modified_base 15: mod_base = OTHER; note = misc_feature - bicyclic nucleic acid scaffold modification
  modified_base 20: mod_base = OTHER; note = misc_feature - bicyclic nucleic acid scaffold modification
  modified_base 23: mod_base = OTHER; note = misc_feature - bicyclic nucleic acid scaffold modification
  source 1..23: mol_type = other RNA
gccatttctcaacagatctgtca

SEQ ID NO: 2070 - RNA, 20 nt, synthetic construct
  misc_feature 1..20: note = Antisense oligonucleotide
  modified_base 1: mod_base = OTHER; note = misc_feature - bicyclic nucleic acid scaffold modification
  modified_base 20: mod_base = OTHER; note = misc_feature - bicyclic nucleic acid scaffold modification
  source 1..20: mol_type = other RNA
gccatttctcaacagatctg

SEQ ID NO: 2071 - RNA, 20 nt, synthetic construct
  misc_feature 1..20: note = Antisense oligonucleotide
  modified_base 1: mod_base = OTHER; note = misc_feature - bicyclic nucleic acid scaffold modification
  modified_base 3: mod_base = OTHER; note = misc_feature - bicyclic nucleic acid scaffold modification
  modified_base 20: mod_base = OTHER; note = misc_feature - bicyclic nucleic acid scaffold modification
  source 1..20: mol_type = other RNA
gccatttctcaacagatctg

SEQ ID NO: 2072 - RNA, 20 nt, synthetic construct
  misc_feature 1..20: note = Antisense oligonucleotide
  modified_base 1: mod_base = OTHER; note = misc_feature - bicyclic nucleic acid scaffold modification
  modified_base 8: mod_base = OTHER; note = misc_feature - bicyclic nucleic acid scaffold modification
  modified_base 20: mod_base = OTHER; note = misc_feature - bicyclic nucleic acid scaffold modification
  source 1..20: mol_type = other RNA
gccatttctcaacagatctg

SEQ ID NO: 2073 - RNA, 20 nt, synthetic construct
  misc_feature 1..20: note = Antisense oligonucleotide
  modified_base 1: mod_base = OTHER; note = misc_feature - bicyclic nucleic acid scaffold modification
  modified_base 10: mod_base = OTHER; note = misc_feature - bicyclic nucleic acid scaffold modification
  modified_base 20: mod_base = OTHER; note = misc_feature - bicyclic nucleic acid scaffold modification
  source 1..20: mol_type = other RNA
gccatttctcaacagatctg

SEQ ID NO: 2074 - RNA, 20 nt, synthetic construct
  misc_feature 1..20: note = Antisense oligonucleotide
  modified_base 1: mod_base = OTHER; note = misc_feature - bicyclic nucleic acid scaffold modification
  modified_base 13: mod_base = OTHER; note = misc_feature - bicyclic nucleic acid scaffold modification
  modified_base 20: mod_base = OTHER; note = misc_feature - bicyclic nucleic acid scaffold modification
  source 1..20: mol_type = other RNA
gccatttctcaacagatctg

SEQ ID NO: 2075 - RNA, 20 nt, synthetic construct
  misc_feature 1..20: note = Antisense oligonucleotide
  modified_base 1: mod_base = OTHER; note = misc_feature - bicyclic nucleic acid scaffold modification
  modified_base 15: mod_base = OTHER; note = misc_feature - bicyclic nucleic acid scaffold modification
  modified_base 20: mod_base = OTHER; note = misc_feature - bicyclic nucleic acid scaffold modification
  source 1..20: mol_type = other RNA
gccatttctcaacagatctg

SEQ ID NO: 2076 - RNA, 20 nt, synthetic construct
  misc_feature 1..20: note = Antisense oligonucleotide
  modified_base 1: mod_base = OTHER; note = misc_feature - bicyclic nucleic acid scaffold modification
  modified_base 18: mod_base = OTHER; note = misc_feature - bicyclic nucleic acid scaffold modification
  modified_base 20: mod_base = OTHER; note = misc_feature - bicyclic nucleic acid scaffold modification
  source 1..20: mol_type = other RNA
gccatttctcaacagatctg

SEQ ID NO: 2077 - RNA, 20 nt, synthetic construct
  misc_feature 1..20: note = Antisense oligonucleotide
  modified_base 1: mod_base = OTHER; note = misc_feature - bicyclic nucleic acid scaffold modification
  modified_base 8: mod_base = OTHER; note = misc_feature - bicyclic nucleic acid scaffold modification
  modified_base 15: mod_base = OTHER; note = misc_feature - bicyclic nucleic acid scaffold modification
  modified_base 20: mod_base = OTHER; note = misc_feature - bicyclic nucleic acid scaffold modification
  source 1..20: mol_type = other RNA
gccatttctcaacagatctg

SEQ ID NO: 2078 - RNA, 20 nt, synthetic construct
  misc_feature 1..20: note = Antisense oligonucleotide
  modified_base 1: mod_base = OTHER; note = misc_feature - bicyclic nucleic acid scaffold modification
  modified_base 3: mod_base = OTHER; note = misc_feature - bicyclic nucleic acid scaffold modification
  modified_base 8: mod_base = OTHER; note = misc_feature - bicyclic nucleic acid scaffold modification
  modified_base 13: mod_base = OTHER; note = misc_feature - bicyclic nucleic acid scaffold modification
  modified_base 18: mod_base = OTHER; note = misc_feature - bicyclic nucleic acid scaffold modification
  modified_base 20: mod_base = OTHER; note = misc_feature - bicyclic nucleic acid scaffold modification
  source 1..20: mol_type = other RNA
gccatttctcaacagatctg

SEQ ID NO: 2079 - RNA, 20 nt, synthetic construct
  misc_feature 1..20: note = Antisense oligonucleotide
  modified_base 1: mod_base = OTHER; note = misc_feature - bicyclic nucleic acid scaffold modification
  modified_base 3: mod_base = OTHER; note = misc_feature - bicyclic nucleic acid scaffold modification
  modified_base 18: mod_base = OTHER; note = misc_feature - bicyclic nucleic acid scaffold modification
  modified_base 20: mod_base = OTHER; note = misc_feature - bicyclic nucleic acid scaffold modification
  source 1..20: mol_type = other RNA
gccatttctcaacagatctg

SEQ ID NO: 2080 - RNA, 20 nt, synthetic construct
  modified_base 19: mod_base = OTHER; note = thymine
  misc_feature 1..20: note = Antisense oligonucleotide
  modified_base 1..2: mod_base = OTHER; note = misc_feature - bicyclic nucleic acid scaffold modification
  modified_base 10: mod_base = OTHER; note = misc_feature - bicyclic nucleic acid scaffold modification
  modified_base 19..20: mod_base = OTHER; note = misc_feature - bicyclic nucleic acid scaffold modification
  source 1..20: mol_type = other RNA
gccatttctcaacagatctg

SEQ ID NO: 2081 - RNA, 20 nt, synthetic construct
  modified_base 20: mod_base = OTHER; note = thymine
  misc_feature 1..20: note = Antisense oligonucleotide
  modified_base 1: mod_base = OTHER; note = misc_feature - bicyclic nucleic acid scaffold modification
  modified_base 20: mod_base = OTHER; note = misc_feature - bicyclic nucleic acid scaffold modification
  source 1..20: mol_type = other RNA
ccatttctcaacagatctgt

SEQ ID NO: 2082 - RNA, 20 nt, synthetic construct
  modified_base 20: mod_base = OTHER; note = thymine
  misc_feature 1..20: note = Antisense oligonucleotide
  modified_base 1: mod_base = OTHER; note = misc_feature - bicyclic nucleic acid scaffold modification
  modified_base 7: mod_base = OTHER; note = misc_feature - bicyclic nucleic acid scaffold modification
  modified_base 20: mod_base = OTHER; note = misc_feature - bicyclic nucleic acid scaffold modification
  source 1..20: mol_type = other RNA
ccatttctcaacagatctgt

SEQ ID NO: 2083 - RNA, 20 nt, synthetic construct
  modified_base 20: mod_base = OTHER; note = thymine
  misc_feature 1..20: note = Antisense oligonucleotide
  modified_base 1: mod_base = OTHER; note = misc_feature - bicyclic nucleic acid scaffold modification
  modified_base 9: mod_base = OTHER; note = misc_feature - bicyclic nucleic acid scaffold modification
  modified_base 20: mod_base = OTHER; note = misc_feature - bicyclic nucleic acid scaffold modification
  source 1..20: mol_type = other RNA
ccatttctcaacagatctgt

SEQ ID NO: 2084 - RNA, 20 nt, synthetic construct
  modified_base 20: mod_base = OTHER; note = thymine
  misc_feature 1..20: note = Antisense oligonucleotide
  modified_base 1: mod_base = OTHER; note = misc_feature - bicyclic nucleic acid scaffold modification
  modified_base 12: mod_base = OTHER; note = misc_feature - bicyclic nucleic acid scaffold modification
  modified_base 20: mod_base = OTHER; note = misc_feature - bicyclic nucleic acid scaffold modification
  source 1..20: mol_type = other RNA
ccatttctcaacagatctgt

SEQ ID NO: 2085 - RNA, 20 nt, synthetic construct
  modified_base 20: mod_base = OTHER; note = thymine
  misc_feature 1..20: note = Antisense oligonucleotide
  modified_base 1: mod_base = OTHER; note = misc_feature - bicyclic nucleic acid scaffold modification
  modified_base 14: mod_base = OTHER; note = misc_feature - bicyclic nucleic acid scaffold modification
  modified_base 20: mod_base = OTHER; note = misc_feature - bicyclic nucleic acid scaffold modification
  source 1..20: mol_type = other RNA
ccatttctcaacagatctgt

SEQ ID NO: 2086 - RNA, 20 nt, synthetic construct
  modified_base 20: mod_base = OTHER; note = thymine
  misc_feature 1..20: note = Antisense oligonucleotide
  modified_base 1: mod_base = OTHER; note = misc_feature - bicyclic nucleic acid scaffold modification
  modified_base 17: mod_base = OTHER; note = misc_feature - bicyclic nucleic acid scaffold modification
  modified_base 20: mod_base = OTHER; note = misc_feature - bicyclic nucleic acid scaffold modification
  source 1..20: mol_type = other RNA
ccatttctcaacagatctgt

SEQ ID NO: 2087 - RNA, 20 nt, synthetic construct
  modified_base 20: mod_base = OTHER; note = thymine
  misc_feature 1..20: note = Antisense oligonucleotide
  modified_base 1: mod_base = OTHER; note = misc_feature - bicyclic nucleic acid scaffold modification
  modified_base 7: mod_base = OTHER; note = misc_feature - bicyclic nucleic acid scaffold modification
  modified_base 14: mod_base = OTHER; note = misc_feature - bicyclic nucleic acid scaffold modification
  modified_base 20: mod_base = OTHER; note = misc_feature - bicyclic nucleic acid scaffold modification
  source 1..20: mol_type = other RNA
ccatttctcaacagatctgt

SEQ ID NO: 2088 - RNA, 20 nt, synthetic construct
  modified_base 20: mod_base = OTHER; note = thymine
  misc_feature 1..20: note = Antisense oligonucleotide
  modified_base 1..2: mod_base = OTHER; note = misc_feature - bicyclic nucleic acid scaffold modification
  modified_base 19..20: mod_base = OTHER; note = misc_feature - bicyclic nucleic acid scaffold modification
  source 1..20: mol_type = other RNA
ccatttctcaacagatctgt

SEQ ID NO: 2089 - RNA, 20 nt, synthetic construct
  modified_base 20: mod_base = OTHER; note = thymine
  misc_feature 1..20: note = Antisense oligonucleotide
  modified_base 1: mod_base = OTHER; note = misc_feature - bicyclic nucleic acid scaffold modification
  modified_base 7: mod_base = OTHER; note = misc_feature - bicyclic nucleic acid scaffold modification
  modified_base 12: mod_base = OTHER; note = misc_feature - bicyclic nucleic acid scaffold modification
  modified_base 17: mod_base = OTHER; note = misc_feature - bicyclic nucleic acid scaffold modification
  modified_base 20: mod_base = OTHER; note = misc_feature - bicyclic nucleic acid scaffold modification
  source 1..20: mol_type = other RNA
ccatttctcaacagatctgt

SEQ ID NO: 2090 - RNA, 20 nt, synthetic construct
  modified_base 20: mod_base = OTHER; note = thymine
  misc_feature 1..20: note = Antisense oligonucleotide
  modified_base 1: mod_base = OTHER; note = misc_feature - bicyclic nucleic acid scaffold modification
  modified_base 7: mod_base = OTHER; note = misc_feature - bicyclic nucleic acid scaffold modification
  modified_base 12: mod_base = OTHER; note = misc_feature - bicyclic nucleic acid scaffold modification
  modified_base 20: mod_base = OTHER; note = misc_feature - bicyclic nucleic acid scaffold modification
  source 1..20: mol_type = other RNA
ccatttctcaacagatctgt

SEQ ID NO: 2091 - RNA, 20 nt, synthetic construct
  modified_base 20: mod_base = OTHER; note = thymine
  misc_feature 1..20: note = Antisense oligonucleotide
  modified_base 1: mod_base = OTHER; note = misc_feature - bicyclic nucleic acid scaffold modification
  modified_base 7: mod_base = OTHER; note = misc_feature - bicyclic nucleic acid scaffold modification
  modified_base 9: mod_base = OTHER; note = misc_feature - bicyclic nucleic acid scaffold modification
  modified_base 12: mod_base = OTHER; note = misc_feature - bicyclic nucleic acid scaffold modification
  modified_base 14: mod_base = OTHER; note = misc_feature - bicyclic nucleic acid scaffold modification
  modified_base 20: mod_base = OTHER; note = misc_feature - bicyclic nucleic acid scaffold modification
  source 1..20: mol_type = other RNA
ccatttctcaacagatctgt

SEQ ID NO: 2092 - RNA, 20 nt, synthetic construct
  modified_base 20: mod_base = OTHER; note = thymine
  misc_feature 1..20: note = Antisense oligonucleotide
  modified_base 1..2: mod_base = OTHER; note = misc_feature - bicyclic nucleic acid scaffold modification
  modified_base 12: mod_base = OTHER; note = misc_feature - bicyclic nucleic acid scaffold modification
  modified_base 19..20: mod_base = OTHER; note = misc_feature - bicyclic nucleic acid scaffold modification
  source 1..20: mol_type = other RNA
ccatttctcaacagatctgt

SEQ ID NO: 2093 - RNA, 20 nt, synthetic construct
  misc_feature 1..20: note = Antisense oligonucleotide
  modified_base 1: mod_base = OTHER; note = misc_feature - bicyclic nucleic acid scaffold modification
  modified_base 20: mod_base = OTHER; note = misc_feature - bicyclic nucleic acid scaffold modification
  source 1..20: mol_type = other RNA
catttctcaacagatctgtc

SEQ ID NO: 2094 - RNA, 20 nt, synthetic construct
  misc_feature 1..20: note = Antisense oligonucleotide
  modified_base 1: mod_base = OTHER; note = misc_feature - bicyclic nucleic acid scaffold modification
  modified_base 6: mod_base = OTHER; note = misc_feature - bicyclic nucleic acid scaffold modification
  modified_base 20: mod_base = OTHER; note = misc_feature - bicyclic nucleic acid scaffold modification
  source 1..20: mol_type = other RNA
catttctcaacagatctgtc

SEQ ID NO: 2095 - RNA, 20 nt, synthetic construct
  misc_feature 1..20: note = Antisense oligonucleotide
  modified_base 1: mod_base = OTHER; note = misc_feature - bicyclic nucleic acid scaffold modification
  modified_base 8: mod_base = OTHER; note = misc_feature - bicyclic nucleic acid scaffold modification
  modified_base 20: mod_base = OTHER; note = misc_feature - bicyclic nucleic acid scaffold modification
  source 1..20: mol_type = other RNA
catttctcaacagatctgtc

SEQ ID NO: 2096 - RNA, 20 nt, synthetic construct
  misc_feature 1..20: note = Antisense oligonucleotide
  modified_base 1: mod_base = OTHER; note = misc_feature - bicyclic nucleic acid scaffold modification
  modified_base 11: mod_base = OTHER; note = misc_feature - bicyclic nucleic acid scaffold modification
  modified_base 20: mod_base = OTHER; note = misc_feature - bicyclic nucleic acid scaffold modification
  source 1..20: mol_type = other RNA
catttctcaacagatctgtc

SEQ ID NO: 2097 - RNA, 20 nt, synthetic construct
  misc_feature 1..20: note = Antisense oligonucleotide
  modified_base 1: mod_base = OTHER; note = misc_feature - bicyclic nucleic acid scaffold modification
  modified_base 13: mod_base = OTHER; note = misc_feature - bicyclic nucleic acid scaffold modification
  modified_base 20: mod_base = OTHER; note = misc_feature - bicyclic nucleic acid scaffold modification
  source 1..20: mol_type = other RNA
catttctcaacagatctgtc

SEQ ID NO: 2098 - RNA, 20 nt, synthetic construct
  misc_feature 1..20: note = Antisense oligonucleotide
  modified_base 1: mod_base = OTHER; note = misc_feature - bicyclic nucleic acid scaffold modification
  modified_base 16: mod_base = OTHER; note = misc_feature - bicyclic nucleic acid scaffold modification
  modified_base 20: mod_base = OTHER; note = misc_feature - bicyclic nucleic acid scaffold modification
  source 1..20: mol_type = other RNA
catttctcaacagatctgtc

SEQ ID NO: 2099 - RNA, 20 nt, synthetic construct
  misc_feature 1..20: note = Antisense oligonucleotide
  modified_base 1: mod_base = OTHER; note = misc_feature - bicyclic nucleic acid scaffold modification
  modified_base 18: mod_base = OTHER; note = misc_feature - bicyclic nucleic acid scaffold modification
  modified_base 20: mod_base = OTHER; note = misc_feature - bicyclic nucleic acid scaffold modification
  source 1..20: mol_type = other RNA
catttctcaacagatctgtc

SEQ ID NO: 2100 - RNA, 14 nt, synthetic construct
  misc_feature 1..14: note = Antisense oligonucleotide
  source 1..14: mol_type = other RNA
ccgacgagcagcga

SEQ ID NO: 2101 - RNA, 14 nt, synthetic construct
  misc_feature 1..14: note = Antisense oligonucleotide
  source 1..14: mol_type = other RNA
tgcaacgatccgta

SEQ ID NO: 2102 - RNA, 14 nt, synthetic construct
  misc_feature 1..14: note = Antisense oligonucleotide
  source 1..14: mol_type = other RNA
ttggctcctgaact

SEQ ID NO: 2103 - RNA, 14 nt, synthetic construct
  misc_feature 1..14: note = Antisense oligonucleotide
  source 1..14: mol_type = other RNA
cctgtccacccatc

SEQ ID NO: 2104 - RNA, 14 nt, synthetic construct
  misc_feature 1..14: note = Antisense oligonucleotide
  source 1..14: mol_type = other RNA
ccgacgagcagcga

SEQ ID NO: 2105 - RNA, 14 nt, synthetic construct
  misc_feature 1..14: note = Antisense oligonucleotide
  source 1..14: mol_type = other RNA
tgcaacgatccgta

SEQ ID NO: 2106 - RNA, 14 nt, synthetic construct
  misc_feature 1..14: note = Antisense oligonucleotide
  source 1..14: mol_type = other RNA
ttggctcctgaact

SEQ ID NO: 2107 - RNA, 14 nt, synthetic construct
  misc_feature 1..14: note = Antisense oligonucleotide
  source 1..14: mol_type = other RNA
cctgtccacccatc

SEQ ID NO: 2108 - RNA, 14 nt, synthetic construct
  misc_feature 1..14: note = Antisense oligonucleotide
  source 1..14: mol_type = other RNA
tgcaacgatccgta

SEQ ID NO: 2109 - RNA, 14 nt, synthetic construct
  misc_feature 1..14: note = Antisense oligonucleotide
  source 1..14: mol_type = other RNA
ttggctcctgaact

SEQ ID NO: 2110 - RNA, 14 nt, synthetic construct
  misc_feature 1..14: note = Antisense oligonucleotide
  source 1..14: mol_type = other RNA
cctgtccacccatc

SEQ ID NO: 2111 - RNA, 14 nt, synthetic construct
  misc_feature 1..14: note = Antisense oligonucleotide
  source 1..14: mol_type = other RNA
ccgacgagcagcga

SEQ ID NO: 2112 - RNA, 14 nt, synthetic construct
  misc_feature 1..14: note = Antisense oligonucleotide
  source 1..14: mol_type = other RNA
tgcaacgatccgta

SEQ ID NO: 2113 - RNA, 14 nt, synthetic construct
  misc_feature 1..14: note = Antisense oligonucleotide
  source 1..14: mol_type = other RNA
ttggctcctgaact

SEQ ID NO: 2114 - RNA, 14 nt, synthetic construct
  misc_feature 1..14: note = Antisense oligonucleotide
  source 1..14: mol_type = other RNA
cctgtccacccatc

SEQ ID NO: 2115 - RNA, 14 nt, synthetic construct
  misc_feature 1..14: note = Antisense oligonucleotide
  source 1..14: mol_type = other RNA
ccgacgagcagcga

SEQ ID NO: 2116 - RNA, 14 nt, synthetic construct
  misc_feature 1..14: note = Antisense oligonucleotide
  source 1..14: mol_type = other RNA
tgcaacgatccgta

SEQ ID NO: 2117 - RNA, 14 nt, synthetic construct
  misc_feature 1..14: note = Antisense oligonucleotide
  source 1..14: mol_type = other RNA
ttggctcctgaact

SEQ ID NO: 2118 - RNA, 14 nt, synthetic construct
  misc_feature 1..14: note = Antisense oligonucleotide
  source 1..14: mol_type = other RNA
cctgtccacccatc

SEQ ID NO: 2119 - RNA, 14 nt, synthetic construct
  misc_feature 1..14: note = Antisense oligonucleotide
  source 1..14: mol_type = other RNA
ccgacgagcagcga

SEQ ID NO: 2120 - RNA, 14 nt, synthetic construct
  misc_feature 1..14: note = Antisense oligonucleotide
  source 1..14: mol_type = other RNA
tgcaacgatccgta

SEQ ID NO: 2121 - RNA, 14 nt, synthetic construct
  misc_feature 1..14: note = Antisense oligonucleotide
  source 1..14: mol_type = other RNA
ttggctcctgaact

SEQ ID NO: 2122 - RNA, 14 nt, synthetic construct
  misc_feature 1..14: note = Antisense oligonucleotide
  source 1..14: mol_type = other RNA
cctgtccacccatc

SEQ ID NO: 2123 - RNA, 14 nt, synthetic construct
  misc_feature 1..14: note = Antisense oligonucleotide
  source 1..14: mol_type = other RNA
tgcaacgatccgta

SEQ ID NO: 2124 - RNA, 14 nt, synthetic construct
  misc_feature 1..14: note = Antisense oligonucleotide
  source 1..14: mol_type = other RNA
ttggctcctgaact

SEQ ID NO: 2125 - RNA, 14 nt, synthetic construct
  misc_feature 1..14: note = Antisense oligonucleotide
  source 1..14: mol_type = other RNA
cctgtccacccatc

SEQ ID NO: 2126 - RNA, 14 nt, synthetic construct
  misc_feature 1..14: note = Antisense oligonucleotide
  source 1..14: mol_type = other RNA
ccgacgagcagcga

SEQ ID NO: 2127 - RNA, 14 nt, synthetic construct
  misc_feature 1..14: note = Antisense oligonucleotide
  source 1..14: mol_type = other RNA
tgcaacgatccgta

SEQ ID NO: 2128 - RNA, 14 nt, synthetic construct
  misc_feature 1..14: note = Antisense oligonucleotide
  source 1..14: mol_type = other RNA
ccgacgagcagcga

SEQ ID NO: 2129 - RNA, 14 nt, synthetic construct
  misc_feature 1..14: note = Antisense oligonucleotide
  source 1..14: mol_type = other RNA
tgcaacgatccgta

SEQ ID NO: 2130 - RNA, 14 nt, synthetic construct
  misc_feature 1..14: note = Antisense oligonucleotide
  source 1..14: mol_type = other RNA
ttggctcctgaact

SEQ ID NO: 2131 - RNA, 14 nt, synthetic construct
  misc_feature 1..14: note = Antisense oligonucleotide
  source 1..14: mol_type = other RNA
cctgtccacccatc

SEQ ID NO: 2132 - RNA, 14 nt, synthetic construct
  misc_feature 1..14: note = Antisense oligonucleotide
  source 1..14: mol_type = other RNA
ccgacgagcagcga

SEQ ID NO: 2133 - RNA, 14 nt, synthetic construct
  misc_feature 1..14: note = Antisense oligonucleotide
  source 1..14: mol_type = other RNA
tgcaacgatccgta

SEQ ID NO: 2134 - RNA, 14 nt, synthetic construct
  misc_feature 1..14: note = Antisense oligonucleotide
  source 1..14: mol_type = other RNA
ttggctcctgaact

SEQ ID NO: 2135 - RNA, 14 nt, synthetic construct
  misc_feature 1..14: note = Antisense oligonucleotide
  source 1..14: mol_type = other RNA
cctgtccacccatc

SEQ ID NO: 2136 - RNA, 14 nt, synthetic construct
  misc_feature 1..14: note = Antisense oligonucleotide
  source 1..14: mol_type = other RNA
tgcaacgatccgta

SEQ ID NO: 2137 - RNA, 14 nt, synthetic construct
  misc_feature 1..14: note = Antisense oligonucleotide
  source 1..14: mol_type = other RNA
ttggctcctgaact

SEQ ID NO: 2138 - RNA, 14 nt, synthetic construct
  misc_feature 1..14: note = Antisense oligonucleotide
  source 1..14: mol_type = other RNA
cctgtccacccatc

SEQ ID NO: 2139 - RNA, 14 nt, synthetic construct
  misc_feature 1..14: note = Antisense oligonucleotide
  source 1..14: mol_type = other RNA
ccgacgagcagcga

SEQ ID NO: 2140 - RNA, 14 nt, synthetic construct
  misc_feature 1..14: note = Antisense oligonucleotide
  source 1..14: mol_type = other RNA
tgcaacgatccgta

SEQ ID NO: 2141 - RNA, 14 nt, synthetic construct
  misc_feature 1..14: note = Antisense oligonucleotide
  source 1..14: mol_type = other RNA
ttggctcctgaact

SEQ ID NO: 2142 - RNA, 14 nt, synthetic construct
  misc_feature 1..14: note = Antisense oligonucleotide
  source 1..14: mol_type = other RNA
cctgtccacccatc

SEQ ID NO: 2143 - RNA, 14 nt, synthetic construct
  misc_feature 1..14: note = Antisense oligonucleotide
  source 1..14: mol_type = other RNA
ccgacgagcagcga

SEQ ID NO: 2144 - RNA, 14 nt, synthetic construct
  misc_feature 1..14: note = Antisense oligonucleotide
  source 1..14: mol_type = other RNA
tgcaacgatccgta

SEQ ID NO: 2145 - RNA, 14 nt, synthetic construct
  misc_feature 1..14: note = Antisense oligonucleotide
  source 1..14: mol_type = other RNA
ttggctcctgaact

SEQ ID NO: 2146 - RNA, 14 nt, synthetic construct
  misc_feature 1..14: note = Antisense oligonucleotide
  source 1..14: mol_type = other RNA
cctgtccacccatc

SEQ ID NO: 2147 - RNA, 14 nt, synthetic construct
  misc_feature 1..14: note = Antisense oligonucleotide
  source 1..14: mol_type = other RNA
ccgacgagcagcga

SEQ ID NO: 2148 - RNA, 14 nt, synthetic construct
  misc_feature 1..14: note = Antisense oligonucleotide
  source 1..14: mol_type = other RNA
tgcaacgatccgta

SEQ ID NO: 2149 - RNA, 14 nt, synthetic construct
  misc_feature 1..14: note = Antisense oligonucleotide
  source 1..14: mol_type = other RNA
ttggctcctgaact

SEQ ID NO: 2150 - RNA, 14 nt, synthetic construct
  misc_feature 1..14: note = Antisense oligonucleotide
  source 1..14: mol_type = other RNA
cctgtccacccatc

SEQ ID NO: 2151 - RNA, 14 nt, synthetic construct
  misc_feature 1..14: note = Antisense oligonucleotide
  source 1..14: mol_type = other RNA
tgcaacgatccgta

SEQ ID NO: 2152 - RNA, 14 nt, synthetic construct
  misc_feature 1..14: note = Antisense oligonucleotide
  source 1..14: mol_type = other RNA
ttggctcctgaact

SEQ ID NO: 2153 - RNA, 14 nt, synthetic construct
  misc_feature 1..14: note = Antisense oligonucleotide
  source 1..14: mol_type = other RNA
cctgtccacccatc

SEQ ID NO: 2154 - RNA, 14 nt, synthetic construct
  misc_feature 1..14: note = Antisense oligonucleotide
  source 1..14: mol_type = other RNA
ccgacgagcagcga

SEQ ID NO: 2155 - RNA, 14 nt, synthetic construct
  misc_feature 1..14: note = Antisense oligonucleotide
  source 1..14: mol_type = other RNA
tgcaacgatccgta

SEQ ID NO: 2156 - RNA, 14 nt, synthetic construct
  misc_feature 1..14: note = Antisense oligonucleotide
  source 1..14: mol_type = other RNA
ttggctcctgaact

SEQ ID NO: 2157 - RNA, 14 nt, synthetic construct
  misc_feature 1..14: note = Antisense oligonucleotide
  source 1..14: mol_type = other RNA
cctgtccacccatc

SEQ ID NO: 2158 - RNA, 14 nt, synthetic construct
  misc_feature 1..14: note = Antisense oligonucleotide
  source 1..14: mol_type = other RNA
cccctgtgctcact

SEQ ID NO: 2159 - RNA, 14 nt, synthetic construct
  misc_feature 1..14: note = Antisense oligonucleotide
  source 1..14: mol_type = other RNA
ccgacgagcagcga

SEQ ID NO: 2160 - RNA, 14 nt, synthetic construct
  misc_feature 1..14: note = Antisense oligonucleotide
  source 1..14: mol_type = other RNA
tgcaacgatccgta

SEQ ID NO: 2161 - RNA, 14 nt, synthetic construct
  misc_feature 1..14: note = Antisense oligonucleotide
  source 1..14: mol_type = other RNA
ttggctcctgaact

SEQ ID NO: 2162 - RNA, 14 nt, synthetic construct
  misc_feature 1..14: note = Antisense oligonucleotide
  source 1..14: mol_type = other RNA
cctgtccacccatc

SEQ ID NO: 2163 - RNA, 14 nt, synthetic construct
  misc_feature 1..14: note = Antisense oligonucleotide
  source 1..14: mol_type = other RNA
ccgacgagcagcga

SEQ ID NO: 2164 - RNA, 14 nt, synthetic construct
  misc_feature 1..14: note = Antisense oligonucleotide
  source 1..14: mol_type = other RNA
tgcaacgatccgta

SEQ ID NO: 2165 - RNA, 14 nt, synthetic construct
  misc_feature 1..14: note = Antisense oligonucleotide
  source 1..14: mol_type = other RNA
ttggctcctgaact

SEQ ID NO: 2166 - RNA, 14 nt, synthetic construct
  misc_feature 1..14: note = Antisense oligonucleotide
  source 1..14: mol_type = other RNA
cctgtccacccatc

SEQ ID NO: 2167 - RNA, 14 nt, synthetic construct
  misc_feature 1..14: note = Antisense oligonucleotide
  source 1..14: mol_type = other RNA
tgcaacgatccgta

SEQ ID NO: 2168 - RNA, 14 nt, synthetic construct
  misc_feature 1..14: note = Antisense oligonucleotide
  source 1..14: mol_type = other RNA
ttggctcctgaact

SEQ ID NO: 2169 - RNA, 14 nt, synthetic construct
  misc_feature 1..14: note = Antisense oligonucleotide
  source 1..14: mol_type = other RNA
cctgtccacccatc

SEQ ID NO: 2170 - RNA, 14 nt, synthetic construct
  misc_feature 1..14: note = Antisense oligonucleotide
  source 1..14: mol_type = other RNA
ccgacgagcagcga

SEQ ID NO: 2171 - RNA, 14 nt, synthetic construct
  misc_feature 1..14: note = Antisense oligonucleotide
  source 1..14: mol_type = other RNA
tgcaacgatccgta

SEQ ID NO: 2172 - RNA, 14 nt, synthetic construct
  misc_feature 1..14: note = Antisense oligonucleotide
  source 1..14: mol_type = other RNA
ttggctcctgaact

SEQ ID NO: 2173 - RNA, 14 nt, synthetic construct
  misc_feature 1..14: note = Antisense oligonucleotide
  source 1..14: mol_type = other RNA
cctgtccacccatc

SEQ ID NO: 2174 - RNA, 14 nt, synthetic construct
  misc_feature 1..14: note = Antisense oligonucleotide
  source 1..14: mol_type = other RNA
ccgacgagcagcga

SEQ ID NO: 2175 - RNA, 14 nt, synthetic construct
  misc_feature 1..14: note = Antisense oligonucleotide
  source 1..14: mol_type = other RNA
tgcaacgatccgta

SEQ ID NO: 2176 - RNA, 14 nt, synthetic construct
  misc_feature 1..14: note = Antisense oligonucleotide
  source 1..14: mol_type = other RNA
ttggctcctgaact

SEQ ID NO: 2177 - RNA, 14 nt, synthetic construct
  misc_feature 1..14: note = Antisense oligonucleotide
  source 1..14: mol_type = other RNA
cctgtccacccatc

SEQ ID NO: 2178 - RNA, 14 nt, synthetic construct
  misc_feature 1..14: note = Antisense oligonucleotide
  source 1..14: mol_type = other RNA
ccgacgagcagcga

SEQ ID NO: 2179 - RNA, 14 nt, synthetic construct
  misc_feature 1..14: note = Antisense oligonucleotide
  source 1..14: mol_type = other RNA
tgcaacgatccgta

SEQ ID NO: 2180 - RNA, 14 nt, synthetic construct
  misc_feature 1..14: note = Antisense oligonucleotide
  source 1..14: mol_type = other RNA
ttggctcctgaact

SEQ ID NO: 2181 - RNA, 14 nt, synthetic construct
  misc_feature 1..14: note = Antisense oligonucleotide
  source 1..14: mol_type = other RNA
cctgtccacccatc

SEQ ID NO: 2182 - RNA, 14 nt, synthetic construct
  misc_feature 1..14: note = Antisense oligonucleotide
  source 1..14: mol_type = other RNA
tgcaacgatccgta

SEQ ID NO: 2183 - RNA, 14 nt, synthetic construct
  misc_feature 1..14: note = Antisense oligonucleotide
  source 1..14: mol_type = other RNA
ttggctcctgaact

SEQ ID NO: 2184 - RNA, 14 nt, synthetic construct
  misc_feature 1..14: note = Antisense oligonucleotide
  source 1..14: mol_type = other RNA
cctgtccacccatc

SEQ ID NO: 2185 - RNA, 14 nt, synthetic construct
  misc_feature 1..14: note = Antisense oligonucleotide
  source 1..14: mol_type = other RNA
ccgacgagcagcga

SEQ ID NO: 2186 - RNA, 14 nt, synthetic construct
  misc_feature 1..14: note = Antisense oligonucleotide
  source 1..14: mol_type = other RNA
tgcaacgatccgta

SEQ ID NO: 2187 - RNA, 14 nt, synthetic construct
  misc_feature 1..14: note = Antisense oligonucleotide
  source 1..14: mol_type = other RNA
ccgacgagcagcga

SEQ ID NO: 2188 - RNA, 14 nt, synthetic construct
  misc_feature 1..14: note = Antisense oligonucleotide
  source 1..14: mol_type = other RNA
tgcaacgatccgta

SEQ ID NO: 2189 - RNA, 14 nt, synthetic construct
  misc_feature 1..14: note = Antisense oligonucleotide
  source 1..14: mol_type = other RNA
ttggctcctgaact

SEQ ID NO: 2190 - RNA, 14 nt, synthetic construct
  misc_feature 1..14: note = Antisense oligonucleotide
  source 1..14: mol_type = other RNA
cctgtccacccatc

SEQ ID NO: 2191 - RNA, 14 nt, synthetic construct
  misc_feature 1..14: note = Antisense oligonucleotide
  source 1..14: mol_type = other RNA
ccgacgagcagcga

SEQ ID NO: 2192 - RNA, 14 nt, synthetic construct
  misc_feature 1..14: note = Antisense oligonucleotide
  source 1..14: mol_type = other RNA
tgcaacgatccgta

SEQ ID NO: 2193 - RNA, 14 nt, synthetic construct
  misc_feature 1..14: note = Antisense oligonucleotide
  source 1..14: mol_type = other RNA
ttggctcctgaact

SEQ ID NO: 2194 - RNA, 14 nt, synthetic construct
  misc_feature 1..14: note = Antisense oligonucleotide
  source 1..14: mol_type = other RNA
cctgtccacccatc

SEQ ID NO: 2195 - RNA, 14 nt, synthetic construct
  misc_feature 1..14: note = Antisense oligonucleotide
  source 1..14: mol_type = other RNA
tgcaacgatccgta

SEQ ID NO: 2196 - RNA, 14 nt, synthetic construct
  misc_feature 1..14: note = Antisense oligonucleotide
  source 1..14: mol_type = other RNA
ttggctcctgaact

SEQ ID NO: 2197 - RNA, 14 nt, synthetic construct
  misc_feature 1..14: note = Antisense oligonucleotide
  source 1..14: mol_type = other RNA
cctgtccacccatc

SEQ ID NO: 2198 - RNA, 14 nt, synthetic construct
  misc_feature 1..14: note = Antisense oligonucleotide
  source 1..14: mol_type = other RNA
ccgacgagcagcga

SEQ ID NO: 2199 - RNA, 14 nt, synthetic construct
  misc_feature 1..14: note = Antisense oligonucleotide
  source 1..14: mol_type = other RNA
tgcaacgatccgta

SEQ ID NO: 2200 - RNA, 14 nt, synthetic construct
  misc_feature 1..14: note = Antisense oligonucleotide
  source 1..14: mol_type = other RNA
ttggctcctgaact

SEQ ID NO: 2201 - RNA, 14 nt, synthetic construct
  misc_feature 1..14: note = Antisense oligonucleotide
  source 1..14: mol_type = other RNA
cctgtccacccatc

SEQ ID NO: 2202 - RNA, 14 nt, synthetic construct
  misc_feature 1..14: note = Antisense oligonucleotide
  source 1..14: mol_type = other RNA
ccgacgagcagcga

SEQ ID NO: 2203 - RNA, 14 nt, synthetic construct
  misc_feature 1..14: note = Antisense oligonucleotide
  source 1..14: mol_type = other RNA
tgcaacgatccgta

SEQ ID NO: 2204 - RNA, 14 nt, synthetic construct
  misc_feature 1..14: note = Antisense oligonucleotide
  source 1..14: mol_type = other RNA
ttggctcctgaact

SEQ ID NO: 2205 - RNA, 14 nt, synthetic construct
  misc_feature 1..14: note = Antisense oligonucleotide
  source 1..14: mol_type = other RNA
cctgtccacccatc

SEQ ID NO: 2206 - RNA, 14 nt, synthetic construct
  misc_feature 1..14: note = Antisense oligonucleotide
  source 1..14: mol_type = other RNA
ccgacgagcagcga

SEQ ID NO: 2207 - RNA, 14 nt, synthetic construct
  misc_feature 1..14: note = Antisense oligonucleotide
  source 1..14: mol_type = other RNA
tgcaacgatccgta

SEQ ID NO: 2208 - RNA, 14 nt, synthetic construct
  misc_feature 1..14: note = Antisense oligonucleotide
  source 1..14: mol_type = other RNA
ttggctcctgaact

SEQ ID NO: 2209 - RNA, 14 nt, synthetic construct
  misc_feature 1..14: note = Antisense oligonucleotide
  source 1..14: mol_type = other RNA
cctgtccacccatc

SEQ ID NO: 2210 - RNA, 14 nt, synthetic construct
  misc_feature 1..14: note = Antisense oligonucleotide
  source 1..14: mol_type = other RNA
tgcaacgatccgta

SEQ ID NO: 2211 - RNA, 14 nt, synthetic construct
  misc_feature 1..14: note = Antisense oligonucleotide
  source 1..14: mol_type = other RNA
ttggctcctgaact

SEQ ID NO: 2212 - RNA, 14 nt, synthetic construct
  misc_feature 1..14: note = Antisense oligonucleotide
  source 1..14: mol_type = other RNA
cctgtccacccatc

SEQ ID NO: 2213 - RNA, 14 nt, synthetic construct
  misc_feature 1..14: note = Antisense oligonucleotide
  source 1..14: mol_type = other RNA
ccgacgagcagcga

SEQ ID NO: 2214 - RNA, 14 nt, synthetic construct
  misc_feature 1..14: note = Antisense oligonucleotide
  source 1..14: mol_type = other RNA
tgcaacgatccgta

SEQ ID NO: 2215 - RNA, 14 nt, synthetic construct
  misc_feature 1..14: note = Antisense oligonucleotide
  source 1..14: mol_type = other RNA
ccgacgagcagcga

SEQ ID NO: 2216 - RNA, 14 nt, synthetic construct
  misc_feature 1..14: note = Antisense oligonucleotide
  source 1..14: mol_type = other RNA
tgcaacgatccgta

SEQ ID NO: 2217 - RNA, 14 nt, synthetic construct
  misc_feature 1..14: note = Antisense oligonucleotide
  source 1..14: mol_type = other RNA
ttggctcctgaact

SEQ ID NO: 2218 - RNA, 14 nt, synthetic construct
  misc_feature 1..14: note = Antisense oligonucleotide
  source 1..14: mol_type = other RNA
cctgtccacccatc

SEQ ID NO: 2219 - RNA, 14 nt, synthetic construct
  misc_feature 1..14: note = Antisense oligonucleotide
  source 1..14: mol_type = other RNA
ccgacgagcagcga

SEQ ID NO: 2220 - RNA, 14 nt, synthetic construct
  misc_feature 1..14: note = Antisense oligonucleotide
  source 1..14: mol_type = other RNA
tgcaacgatccgta

SEQ ID NO: 2221 - RNA, 14 nt, synthetic construct
  misc_feature 1..14: note = Antisense oligonucleotide
  source 1..14: mol_type = other RNA
ttggctcctgaact

SEQ ID NO: 2222 - RNA, 14 nt, synthetic construct
  misc_feature 1..14: note = Antisense oligonucleotide
  source 1..14: mol_type = other RNA
cctgtccacccatc

SEQ ID NO: 2223 - RNA, 14 nt, synthetic construct
  misc_feature 1..14: note = Antisense oligonucleotide
  source 1..14: mol_type = other RNA
tgcaacgatccgta

SEQ ID NO: 2224 - RNA, 14 nt, synthetic construct
  misc_feature 1..14: note = Antisense oligonucleotide
  source 1..14: mol_type = other RNA
ttggctcctgaact

SEQ ID NO: 2225 - RNA, 14 nt, synthetic construct
  misc_feature 1..14: note = Antisense oligonucleotide
  source 1..14: mol_type = other RNA
cctgtccacccatc

SEQ ID NO: 2226 - RNA, 14 nt, synthetic construct
  misc_feature 1..14: note = Antisense oligonucleotide
  source 1..14: mol_type = other RNA
ccgacgagcagcga

SEQ ID NO: 2227 - RNA, 14 nt, synthetic construct
  misc_feature 1..14: note = Antisense oligonucleotide
  source 1..14: mol_type = other RNA
tgcaacgatccgta

SEQ ID NO: 2228 - RNA, 14 nt, synthetic construct
  misc_feature 1..14: note = Antisense oligonucleotide
  source 1..14: mol_type = other RNA
ttggctcctgaact

SEQ ID NO: 2229 - RNA, 14 nt, synthetic construct
  misc_feature 1..14: note = Antisense oligonucleotide
  source 1..14: mol_type = other RNA
cctgtccacccatc

SEQ ID NO: 2230 - RNA, 14 nt, synthetic construct
  misc_feature 1..14: note = Antisense oligonucleotide
  source 1..14: mol_type = other RNA
ccgacgagcagcga

SEQ ID NO: 2231 - RNA, 14 nt, synthetic construct
  misc_feature 1..14: note = Antisense oligonucleotide
  source 1..14: mol_type = other RNA
tgcaacgatccgta

SEQ ID NO: 2232 - RNA, 14 nt, synthetic construct
  misc_feature 1..14: note = Antisense oligonucleotide
  source 1..14: mol_type = other RNA
ttggctcctgaact

SEQ ID NO: 2233 - RNA, 14 nt, synthetic construct
  misc_feature 1..14: note = Antisense oligonucleotide
  source 1..14: mol_type = other RNA
cctgtccacccatc

SEQ ID NO: 2234 - RNA, 14 nt, synthetic construct
  misc_feature 1..14: note = Antisense oligonucleotide
  source 1..14: mol_type = other RNA
ccgacgagcagcga

SEQ ID NO: 2235 - RNA, 14 nt, synthetic construct
  misc_feature 1..14: note = Antisense oligonucleotide
  source 1..14: mol_type = other RNA
tgcaacgatccgta

SEQ ID NO: 2236 - RNA, 14 nt, synthetic construct
  misc_feature 1..14: note = Antisense oligonucleotide
  source 1..14: mol_type = other RNA
ttggctcctgaact

SEQ ID NO: 2237 - RNA, 14 nt, synthetic construct
  misc_feature 1..14: note = Antisense oligonucleotide
  source 1..14: mol_type = other RNA
cctgtccacccatc

SEQ ID NO: 2238 - RNA, 14 nt, synthetic construct
  misc_feature 1..14: note = Antisense oligonucleotide
  source 1..14: mol_type = other RNA
tgcaacgatccgta

SEQ ID NO: 2239 - RNA, 14 nt, synthetic construct
  misc_feature 1..14: note = Antisense oligonucleotide
  source 1..14: mol_type = other RNA
ttggctcctgaact

SEQ ID NO: 2240 - RNA, 14 nt, synthetic construct
  misc_feature 1..14: note = Antisense oligonucleotide
  source 1..14: mol_type = other RNA
cctgtccacccatc

SEQ ID NO: 2241 - RNA, 14 nt, synthetic construct
  misc_feature 1..14: note = Antisense oligonucleotide
  source 1..14: mol_type = other RNA
ccgacgagcagcga

SEQ ID NO: 2242 - RNA, 14 nt, synthetic construct
  misc_feature 1..14: note = Antisense oligonucleotide
  source 1..14: mol_type = other RNA
tgcaacgatccgta

SEQ ID NO: 2243 - RNA, 14 nt, synthetic construct
  misc_feature 1..14: note = Antisense oligonucleotide
  source 1..14: mol_type = other RNA
ccgacgagcagcga

SEQ ID NO: 2244 - RNA, 14 nt, synthetic construct
  misc_feature 1..14: note = Antisense oligonucleotide
  source 1..14: mol_type = other RNA
tgcaacgatccgta

SEQ ID NO: 2245 - RNA, 14 nt, synthetic construct
  misc_feature 1..14: note = Antisense oligonucleotide
  source 1..14: mol_type = other RNA
ttggctcctgaact

SEQ ID NO: 2246 - RNA, 14 nt, synthetic construct
  misc_feature 1..14: note = Antisense oligonucleotide
  source 1..14: mol_type = other RNA
cctgtccacccatc

SEQ ID NO: 2247 - RNA, 14 nt, synthetic construct
  misc_feature 1..14: note = Antisense oligonucleotide
  source 1..14: mol_type = other RNA
ccgacgagcagcga

SEQ ID NO: 2248 - RNA, 14 nt, synthetic construct
  misc_feature 1..14: note = Antisense oligonucleotide
  source 1..14: mol_type = other RNA
tgcaacgatccgta

SEQ ID NO: 2249 - RNA, 14 nt, synthetic construct
  misc_feature 1..14: note = Antisense oligonucleotide
  source 1..14: mol_type = other RNA
ttggctcctgaact

SEQ ID NO: 2250 - RNA, 14 nt, synthetic construct
  misc_feature 1..14: note = Antisense oligonucleotide
  source 1..14: mol_type = other RNA
cctgtccacccatc

SEQ ID NO: 2251 - RNA, 14 nt, synthetic construct
  misc_feature 1..14: note = Antisense oligonucleotide
  source 1..14: mol_type = other RNA
tgcaacgatccgta

SEQ ID NO: 2252 - RNA, 14 nt, synthetic construct
  misc_feature 1..14: note = Antisense oligonucleotide
  source 1..14: mol_type = other RNA
ttggctcctgaact

SEQ ID NO: 2253 - RNA, 14 nt, synthetic construct
  misc_feature 1..14: note = Antisense oligonucleotide
  source 1..14: mol_type = other RNA
cctgtccacccatc

SEQ ID NO: 2254 - RNA, 14 nt, synthetic construct
  misc_feature 1..14: note = Antisense oligonucleotide
  source 1..14: mol_type = other RNA
ccgacgagcagcga

SEQ ID NO: 2255 - RNA, 14 nt, synthetic construct
  misc_feature 1..14: note = Antisense oligonucleotide
  source 1..14: mol_type = other RNA
tgcaacgatccgta

SEQ ID NO: 2256 - RNA, 14 nt, synthetic construct
  misc_feature 1..14: note = Antisense oligonucleotide
  source 1..14: mol_type = other RNA
ttggctcctgaact

SEQ ID NO: 2257 - RNA, 14 nt, synthetic construct
  misc_feature 1..14: note = Antisense oligonucleotide
  source 1..14: mol_type = other RNA
cctgtccacccatc

SEQ ID NO: 2258 - RNA, 14 nt, synthetic construct
  misc_feature 1..14: note = Antisense oligonucleotide
  source 1..14: mol_type = other RNA
ccgacgagcagcga

SEQ ID NO: 2259 - RNA, 14 nt, synthetic construct
  misc_feature 1..14: note = Antisense oligonucleotide
  source 1..14: mol_type = other RNA
tgcaacgatccgta

SEQ ID NO: 2260 - RNA, 14 nt, synthetic construct
  misc_feature 1..14: note = Antisense oligonucleotide
  source 1..14: mol_type = other RNA
ttggctcctgaact

SEQ ID NO: 2261 - RNA, 14 nt, synthetic construct
  misc_feature 1..14: note = Antisense oligonucleotide
  source 1..14: mol_type = other RNA
cctgtccacccatc

SEQ ID NO: 2262 - RNA, 14 nt, synthetic construct
  misc_feature 1..14: note = Antisense oligonucleotide
  source 1..14: mol_type = other RNA
ccgacgagcagcga

SEQ ID NO: 2263 - RNA, 14 nt, synthetic construct
  misc_feature 1..14: note = Antisense oligonucleotide
  source 1..14: mol_type = other RNA
tgcaacgatccgta

SEQ ID NO: 2264 - RNA, 14 nt, synthetic construct
  misc_feature 1..14: note = Antisense oligonucleotide
  source 1..14: mol_type = other RNA
ttggctcctgaact

SEQ ID NO: 2265 - RNA, 14 nt, synthetic construct
  misc_feature 1..14: note = Antisense oligonucleotide
  source 1..14: mol_type = other RNA
cctgtccacccatc

SEQ ID NO: 2266 - RNA, 14 nt, synthetic construct
  misc_feature 1..14: note = Antisense oligonucleotide
  source 1..14: mol_type = other RNA
tgcaacgatccgta

SEQ ID NO: 2267 - RNA, 14 nt, synthetic construct
  misc_feature 1..14: note = Antisense oligonucleotide
  source 1..14: mol_type = other RNA
ccgacgagcagcga

SEQ ID NO: 2268 - RNA, 14 nt, synthetic construct
  misc_feature 1..14: note = Antisense oligonucleotide
  source 1..14: mol_type = other RNA
tgcaacgatccgta

SEQ ID NO: 2269 - RNA, 14 nt, synthetic construct
  misc_feature 1..14: note = Antisense oligonucleotide
  source 1..14: mol_type = other RNA
ttggctcctgaact

SEQ ID NO: 2270 - RNA, 14 nt, synthetic construct
  misc_feature 1..14: note = Antisense oligonucleotide
  source 1..14: mol_type = other RNA
cctgtccacccatc

SEQ ID NO: 2271 - RNA, 14 nt, synthetic construct
  misc_feature 1..14: note = Antisense oligonucleotide
  source 1..14: mol_type = other RNA
ccgacgagcagcga

SEQ ID NO: 2272 - RNA, 14 nt, synthetic construct
  misc_feature 1..14: note = Antisense oligonucleotide
  source 1..14: mol_type = other RNA
tgcaacgatccgta

SEQ ID NO: 2273 - RNA, 14 nt, synthetic construct
  misc_feature 1..14: note = Antisense oligonucleotide
  source 1..14: mol_type = other RNA
ttggctcctgaact

SEQ ID NO: 2274 - RNA, 14 nt, synthetic construct
  misc_feature 1..14: note = Antisense oligonucleotide
  source 1..14: mol_type = other RNA
cctgtccacccatc

SEQ ID NO: 2275 - RNA, 14 nt, synthetic construct
  misc_feature 1..14: note = Antisense oligonucleotide
  source 1..14: mol_type = other RNA
tgcaacgatccgta

SEQ ID NO: 2276 - RNA, 14 nt, synthetic construct
  misc_feature 1..14: note = Antisense oligonucleotide
  source 1..14: mol_type = other RNA
ttggctcctgaact

SEQ ID NO: 2277 - RNA, 14 nt, synthetic construct
  misc_feature 1..14: note = Antisense oligonucleotide
  source 1..14: mol_type = other RNA
cctgtccacccatc

SEQ ID NO: 2278 - RNA, 14 nt, synthetic construct
  misc_feature 1..14: note = Antisense oligonucleotide
  source 1..14: mol_type = other RNA
ccgacgagcagcga

SEQ ID NO: 2279 - RNA, 14 nt, synthetic construct
  misc_feature 1..14: note = Antisense oligonucleotide
  source 1..14: mol_type = other RNA
tgcaacgatccgta

SEQ ID NO: 2280 - RNA, 14 nt, synthetic construct
  misc_feature 1..14: note = Antisense oligonucleotide
  source 1..14: mol_type = other RNA
ttggctcctgaact

SEQ ID NO: 2281 - RNA, 14 nt, synthetic construct
  misc_feature 1..14: note = Antisense oligonucleotide
  source 1..14: mol_type = other RNA
cctgtccacccatc

SEQ ID NO: 2282 - RNA, 14 nt, synthetic construct
  misc_feature 1..14: note = Antisense oligonucleotide
  source 1..14: mol_type = other RNA
ccgacgagcagcga

SEQ ID NO: 2283 - RNA, 14 nt, synthetic construct
  misc_feature 1..14: note = Antisense oligonucleotide
  source 1..14: mol_type = other RNA
tgcaacgatccgta

SEQ ID NO: 2284 - RNA, 14 nt, synthetic construct
  misc_feature 1..14: note = Antisense oligonucleotide
  source 1..14: mol_type = other RNA
ttggctcctgaact

SEQ ID NO: 2285 - RNA, 14 nt, synthetic construct
  misc_feature 1..14: note = Antisense oligonucleotide
  source 1..14: mol_type = other RNA
cctgtccacccatc

SEQ ID NO: 2286 - RNA, 14 nt, synthetic construct
  misc_feature 1..14: note = Antisense oligonucleotide
  source 1..14: mol_type = other RNA
ccgacgagcagcga

SEQ ID NO: 2287 - RNA, 14 nt, synthetic construct
  misc_feature 1..14: note = Antisense oligonucleotide
  source 1..14: mol_type = other RNA
tgcaacgatccgta

SEQ ID NO: 2288 - RNA, 14 nt, synthetic construct
  misc_feature 1..14: note = Antisense oligonucleotide
  source 1..14: mol_type = other RNA
ttggctcctgaact

SEQ ID NO: 2289 - RNA, 14 nt, synthetic construct
  misc_feature 1..14: note = Antisense oligonucleotide
  source 1..14: mol_type = other RNA
cctgtccacccatc

SEQ ID NO: 2290 - RNA, 14 nt, synthetic construct
  misc_feature 1..14: note = Antisense oligonucleotide
  source 1..14: mol_type = other RNA
tgcaacgatccgta

SEQ ID NO: 2291 - RNA, 14 nt, synthetic construct
  misc_feature 1..14: note = Antisense oligonucleotide
  source 1..14: mol_type = other RNA
ttggctcctgaact

SEQ ID NO: 2292 - RNA, 14 nt, synthetic construct
  misc_feature 1..14: note = Antisense oligonucleotide
  source 1..14: mol_type = other RNA
cctgtccacccatc

SEQ ID NO: 2293 - RNA, 14 nt, synthetic construct
  misc_feature 1..14: note = Antisense oligonucleotide
  source 1..14: mol_type = other RNA
ccgacgagcagcga

SEQ ID NO: 2294 - RNA, 14 nt, synthetic construct
  misc_feature 1..14: note = Antisense oligonucleotide
  source 1..14: mol_type = other RNA
tgcaacgatccgta

SEQ ID NO: 2295 - RNA, 14 nt, synthetic construct
  misc_feature 1..14: note = Antisense oligonucleotide
  source 1..14: mol_type = other RNA
ccgacgagcagcga

SEQ ID NO: 2296 - RNA, 14 nt, synthetic construct
  misc_feature 1..14: note = Antisense oligonucleotide
  source 1..14: mol_type = other RNA
tgcaacgatccgta

SEQ ID NO: 2297 - RNA, 14 nt, synthetic construct
  misc_feature 1..14: note = Antisense oligonucleotide
  source 1..14: mol_type = other RNA
ttggctcctgaact

SEQ ID NO: 2298 - RNA, 14 nt, synthetic construct
  misc_feature 1..14: note = Antisense oligonucleotide
  source 1..14: mol_type = other RNA
cctgtccacccatc

SEQ ID NO: 2299 - RNA, 14 nt, synthetic construct
  misc_feature 1..14: note = Antisense oligonucleotide
  source 1..14: mol_type = other RNA
ccgacgagcagcga

SEQ ID NO: 2300 - RNA, 14 nt, synthetic construct
  misc_feature 1..14: note = Antisense oligonucleotide
  source 1..14: mol_type = other RNA
tgcaacgatccgta

SEQ ID NO: 2301 - RNA, 14 nt, synthetic construct
  misc_feature 1..14: note = Antisense oligonucleotide
  source 1..14: mol_type = other RNA
ttggctcctgaact

SEQ ID NO: 2302 - RNA, 14 nt, synthetic construct
  misc_feature 1..14: note = Antisense oligonucleotide
  source 1..14: mol_type = other RNA
cctgtccacccatc

SEQ ID NO: 2303 - RNA, 14 nt, synthetic construct
  misc_feature 1..14: note = Antisense oligonucleotide
  source 1..14: mol_type = other RNA
tgcaacgatccgta

SEQ ID NO: 2304 - RNA, 14 nt, synthetic construct
  misc_feature 1..14: note = Antisense oligonucleotide
  source 1..14: mol_type = other RNA
ttggctcctgaact

SEQ ID NO: 2305 - RNA, 14 nt, synthetic construct
  misc_feature 1..14: note = Antisense oligonucleotide
  source 1..14: mol_type = other RNA
cctgtccacccatc

SEQ ID NO: 2306 - RNA, 14 nt, synthetic construct
  misc_feature 1..14: note = Antisense oligonucleotide
  source 1..14: mol_type = other RNA
ccgacgagcagcga

SEQ ID NO: 2307 - RNA, 14 nt, synthetic construct
  misc_feature 1..14: note = Antisense oligonucleotide
  source 1..14: mol_type = other RNA
tgcaacgatccgta

SEQ ID NO: 2308 - RNA, 14 nt, synthetic construct
  misc_feature 1..14: note = Antisense oligonucleotide
  source 1..14: mol_type = other RNA
ttggctcctgaact

SEQ ID NO: 2309 - RNA, 14 nt, synthetic construct
  misc_feature 1..14: note = Antisense oligonucleotide
  source 1..14: mol_type = other RNA
cctgtccacccatc

SEQ ID NO: 2310 - RNA, 14 nt, synthetic construct
  misc_feature 1..14: note = Antisense oligonucleotide
  source 1..14: mol_type = other RNA
ccgacgagcagcga

SEQ ID NO: 2311 - RNA, 14 nt, synthetic construct
  misc_feature 1..14: note = Antisense oligonucleotide
  source 1..14: mol_type = other RNA
tgcaacgatccgta

SEQ ID NO: 2312 - RNA, 14 nt, synthetic construct
  misc_feature 1..14: note = Antisense oligonucleotide
  source 1..14: mol_type = other RNA
ttggctcctgaact

SEQ ID NO: 2313 - RNA, 14 nt, synthetic construct
  misc_feature 1..14: note = Antisense oligonucleotide
  source 1..14: mol_type = other RNA
cctgtccacccatc

SEQ ID NO: 2314 - RNA, 14 nt, synthetic construct
  misc_feature 1..14: note = Antisense oligonucleotide
  source 1..14: mol_type = other RNA
ccgacgagcagcga

SEQ ID NO: 2315 - RNA, 14 nt, synthetic construct
  misc_feature 1..14: note = Antisense oligonucleotide
  source 1..14: mol_type = other RNA
tgcaacgatccgta

SEQ ID NO: 2316 - RNA, 14 nt, synthetic construct
  misc_feature 1..14: note = Antisense oligonucleotide
  source 1..14: mol_type = other RNA
ttggctcctgaact

SEQ ID NO: 2317 - RNA, 14 nt, synthetic construct
  misc_feature 1..14: note = Antisense oligonucleotide
  source 1..14: mol_type = other RNA
cctgtccacccatc

SEQ ID NO: 2318 - RNA, 14 nt, synthetic construct
  misc_feature 1..14: note = Antisense oligonucleotide
  source 1..14: mol_type = other RNA
tgcaacgatccgta

SEQ ID NO: 2319 - RNA, 14 nt, synthetic construct
  misc_feature 1..14: note = Antisense oligonucleotide
  source 1..14: mol_type = other RNA
ttggctcctgaact

SEQ ID NO: 2320 - RNA, 14 nt, synthetic construct
  misc_feature 1..14: note = Antisense oligonucleotide
  source 1..14: mol_type = other RNA
cctgtccacccatc

SEQ ID NO: 2321 - RNA, 14 nt, synthetic construct
  misc_feature 1..14: note = Antisense oligonucleotide
  source 1..14: mol_type = other RNA
ccgacgagcagcga

SEQ ID NO: 2322 - RNA, 14 nt, synthetic construct
  misc_feature 1..14: note = Antisense oligonucleotide
  source 1..14: mol_type = other RNA
tgcaacgatccgta

SEQ ID NO: 2323 - RNA, 14 nt, synthetic construct
  misc_feature 1..14: note = Antisense oligonucleotide
  source 1..14: mol_type = other RNA
ttggctcctgaact

SEQ ID NO: 2324 - RNA, 14 nt, synthetic construct
  misc_feature 1..14: note = Antisense oligonucleotide
  source 1..14: mol_type = other RNA
cctgtccacccatc

SEQ ID NO: 2325 - RNA, 14 nt, synthetic construct
  misc_feature 1..14: note = Antisense oligonucleotide
  source 1..14: mol_type = other RNA
cccctgtgctcact

SEQ ID NO: 2326 - RNA, 14 nt, synthetic construct
  misc_feature 1..14: note = Antisense oligonucleotide
  source 1..14: mol_type = other RNA
ccgacgagcagcga

SEQ ID NO: 2327 - RNA, 14 nt, synthetic construct
  misc_feature 1..14: note = Antisense oligonucleotide
  source 1..14: mol_type = other RNA
tgcaacgatccgta

SEQ ID NO: 2328 - RNA, 14 nt, synthetic construct
  misc_feature 1..14: note = Antisense oligonucleotide
  source 1..14: mol_type = other RNA
ttggctcctgaact

SEQ ID NO: 2329 - RNA, 14 nt, synthetic construct
  misc_feature 1..14: note = Antisense oligonucleotide
  source 1..14: mol_type = other RNA
cctgtccacccatc

SEQ ID NO: 2330 - RNA, 14 nt, synthetic construct
  misc_feature 1..14: note = Antisense oligonucleotide
  source 1..14: mol_type = other RNA
ccgacgagcagcga

SEQ ID NO: 2331 - RNA, 14 nt, synthetic construct
  misc_feature 1..14: note = Antisense oligonucleotide
  source 1..14: mol_type = other RNA
tgcaacgatccgta

SEQ ID NO: 2332 - RNA, 14 nt, synthetic construct
  misc_feature 1..14: note = Antisense oligonucleotide
  source 1..14: mol_type = other RNA
ttggctcctgaact

SEQ ID NO: 2333 - RNA, 14 nt, synthetic construct
  misc_feature 1..14: note = Antisense oligonucleotide
  source 1..14: mol_type = other RNA
cctgtccacccatc

SEQ ID NO: 2334 - RNA, 14 nt, synthetic construct
  misc_feature 1..14: note = Antisense oligonucleotide
  source 1..14: mol_type = other RNA
tgcaacgatccgta

SEQ ID NO: 2335 - RNA, 14 nt, synthetic construct
  misc_feature 1..14: note = Antisense oligonucleotide
  source 1..14: mol_type = other RNA
ttggctcctgaact

SEQ ID NO: 2336 - RNA, 14 nt, synthetic construct
  misc_feature 1..14: note = Antisense oligonucleotide
  source 1..14: mol_type = other RNA
cctgtccacccatc

SEQ ID NO: 2337 - RNA, 14 nt, synthetic construct
  misc_feature 1..14: note = Antisense oligonucleotide
  source 1..14: mol_type = other RNA
ccgacgagcagcga

SEQ ID NO: 2338 - RNA, 14 nt, synthetic construct
  misc_feature 1..14: note = Antisense oligonucleotide
  source 1..14: mol_type = other RNA
tgcaacgatccgta

SEQ ID NO: 2339 - RNA, 14 nt, synthetic construct
  misc_feature 1..14: note = Antisense oligonucleotide
  source 1..14: mol_type = other RNA
ttggctcctgaact

SEQ ID NO: 2340 - RNA, 14 nt, synthetic construct
  misc_feature 1..14: note = Antisense oligonucleotide
  source 1..14: mol_type = other RNA
cctgtccacccatc

SEQ ID NO: 2341 - RNA, 14 nt, synthetic construct
  misc_feature 1..14: note = Antisense oligonucleotide
  source 1..14: mol_type = other RNA
ccgacgagcagcga

SEQ ID NO: 2342 - RNA, 14 nt, synthetic construct
  misc_feature 1..14: note = Antisense oligonucleotide
  source 1..14: mol_type = other RNA
tgcaacgatccgta

SEQ ID NO: 2343 - RNA, 14 nt, synthetic construct
  misc_feature 1..14: note = Antisense oligonucleotide
  source 1..14: mol_type = other RNA
ttggctcctgaact

SEQ ID NO: 2344 - RNA, 14 nt, synthetic construct
  misc_feature 1..14: note = Antisense oligonucleotide
  source 1..14: mol_type = other RNA
cctgtccacccatc

SEQ ID NO: 2345 - RNA, 14 nt, synthetic construct
  misc_feature 1..14: note = Antisense oligonucleotide
  source 1..14: mol_type = other RNA
ccgacgagcagcga

SEQ ID NO: 2346 - RNA, 14 nt, synthetic construct
  misc_feature 1..14: note = Antisense oligonucleotide
  source 1..14: mol_type = other RNA
tgcaacgatccgta

SEQ ID NO: 2347 - RNA, 14 nt, synthetic construct
  misc_feature 1..14: note = Antisense oligonucleotide
  source 1..14: mol_type = other RNA
ttggctcctgaact

SEQ ID NO: 2348 - RNA, 14 nt, synthetic construct
  misc_feature 1..14: note = Antisense oligonucleotide
  source 1..14: mol_type = other RNA
cctgtccacccatc

SEQ ID NO: 2349 - RNA, 14 nt, synthetic construct
  misc_feature 1..14: note = Antisense oligonucleotide
  source 1..14: mol_type = other RNA
tgcaacgatccgta

SEQ ID NO: 2350 - RNA, 14 nt, synthetic construct
  misc_feature 1..14: note = Antisense oligonucleotide
  source 1..14: mol_type = other RNA
ttggctcctgaact

SEQ ID NO: 2351 - RNA, 14 nt, synthetic construct
  misc_feature 1..14: note = Antisense oligonucleotide
  source 1..14: mol_type = other RNA
cctgtccacccatc

SEQ ID NO: 2352 - RNA, 14 nt, synthetic construct
  misc_feature 1..14: note = Antisense oligonucleotide
  source 1..14: mol_type = other RNA
ccgacgagcagcga

SEQ ID NO: 2353 - RNA, 14 nt, synthetic construct
  misc_feature 1..14: note = Antisense oligonucleotide
  source 1..14: mol_type = other RNA
tgcaacgatccgta

SEQ ID NO: 2354 - RNA, 14 nt, synthetic construct
  misc_feature 1..14: note = Antisense oligonucleotide
  source 1..14: mol_type = other RNA
ccgacgagcagcga

SEQ ID NO: 2355 - RNA, 14 nt, synthetic construct
  misc_feature 1..14: note = Antisense oligonucleotide
  source 1..14: mol_type = other RNA
tgcaacgatccgta

SEQ ID NO: 2356 - RNA, 14 nt, synthetic construct
  misc_feature 1..14: note = Antisense oligonucleotide
  source 1..14: mol_type = other RNA
ttggctcctgaact

SEQ ID NO: 2357 - RNA, 14 nt, synthetic construct
  misc_feature 1..14: note = Antisense oligonucleotide
  source 1..14: mol_type = other RNA
cctgtccacccatc

SEQ ID NO: 2358 - RNA, 14 nt, synthetic construct
  misc_feature 1..14: note = Antisense oligonucleotide
  source 1..14: mol_type = other RNA
ccgacgagcagcga

SEQ ID NO: 2359 - RNA, 14 nt, synthetic construct
  misc_feature 1..14: note = Antisense oligonucleotide
  source 1..14: mol_type = other RNA
tgcaacgatccgta

SEQ ID NO: 2360 - RNA, 14 nt, synthetic construct
  misc_feature 1..14: note = Antisense oligonucleotide
  source 1..14: mol_type = other RNA
ttggctcctgaact

SEQ ID NO: 2361 - RNA, 14 nt, synthetic construct
  misc_feature 1..14: note = Antisense oligonucleotide
  source 1..14: mol_type = other RNA
cctgtccacccatc

SEQ ID NO: 2362 - RNA, 14 nt, synthetic construct
  misc_feature 1..14: note = Antisense oligonucleotide
  source 1..14: mol_type = other RNA
tgcaacgatccgta

SEQ ID NO: 2363 - RNA, 14 nt, synthetic construct
  misc_feature 1..14: note = Antisense oligonucleotide
  source 1..14: mol_type = other RNA
ttggctcctgaact

SEQ ID NO: 2364 - RNA, 14 nt, synthetic construct
  misc_feature 1..14: note = Antisense oligonucleotide
  source 1..14: mol_type = other RNA
cctgtccacccatc

SEQ ID NO: 2365 - RNA, 14 nt, synthetic construct
  misc_feature 1..14: note = Antisense oligonucleotide
  source 1..14: mol_type = other RNA
ccgacgagcagcga

SEQ ID NO: 2366 - RNA, 14 nt, synthetic construct
  misc_feature 1..14: note = Antisense oligonucleotide
  source 1..14: mol_type = other RNA
tgcaacgatccgta

SEQ ID NO: 2367 - RNA, 14 nt, synthetic construct
  misc_feature 1..14: note = Antisense oligonucleotide
  source 1..14: mol_type = other RNA
ttggctcctgaact

SEQ ID NO: 2368 - RNA, 14 nt, synthetic construct
  misc_feature 1..14: note = Antisense oligonucleotide
  source 1..14: mol_type = other RNA
cctgtccacccatc

SEQ ID NO: 2369 - RNA, 14 nt, synthetic construct
  misc_feature 1..14: note = Antisense oligonucleotide
  source 1..14: mol_type = other RNA
ccgacgagcagcga

SEQ ID NO: 2370 - RNA, 14 nt, synthetic construct
  misc_feature 1..14: note = Antisense oligonucleotide
  source 1..14: mol_type = other RNA
tgcaacgatccgta

SEQ ID NO: 2371 - RNA, 14 nt, synthetic construct
  misc_feature 1..14: note = Antisense oligonucleotide
  source 1..14: mol_type = other RNA
ttggctcctgaact

SEQ ID NO: 2372 - RNA, 14 nt, synthetic construct
  misc_feature 1..14: note = Antisense oligonucleotide
  source 1..14: mol_type = other RNA
cctgtccacccatc

SEQ ID NO: 2373 - RNA, 14 nt, synthetic construct
  misc_feature 1..14: note = Antisense oligonucleotide
  source 1..14: mol_type = other RNA
ccgacgagcagcga

SEQ ID NO: 2374 - RNA, 14 nt, synthetic construct
  misc_feature 1..14: note = Antisense oligonucleotide
  source 1..14: mol_type = other RNA
tgcaacgatccgta

SEQ ID NO: 2375 - RNA, 14 nt, synthetic construct
  misc_feature 1..14: note = Antisense oligonucleotide
  source 1..14: mol_type = other RNA
ttggctcctgaact

SEQ ID NO: 2376 - RNA, 14 nt, synthetic construct
  misc_feature 1..14: note = Antisense oligonucleotide
  source 1..14: mol_type = other RNA
cctgtccacccatc

SEQ ID NO: 2377 - RNA, 14 nt, synthetic construct
  misc_feature 1..14: note = Antisense oligonucleotide
  source 1..14: mol_type = other RNA
tgcaacgatccgta

SEQ ID NO: 2378 - RNA, 14 nt, synthetic construct
  misc_feature 1..14: note = Antisense oligonucleotide
  source 1..14: mol_type = other RNA
ttggctcctgaact

SEQ ID NO: 2379 - RNA, 14 nt, synthetic construct
  misc_feature 1..14: note = Antisense oligonucleotide
  source 1..14: mol_type = other RNA
cctgtccacccatc

SEQ ID NO: 2380 - RNA, 14 nt, synthetic construct
  misc_feature 1..14: note = Antisense oligonucleotide
  source 1..14: mol_type = other RNA
ccgacgagcagcga

SEQ ID NO: 2381 - RNA, 14 nt, synthetic construct
  misc_feature 1..14: note = Antisense oligonucleotide
  source 1..14: mol_type = other RNA
tgcaacgatccgta

SEQ ID NO: 2382 - RNA, 14 nt, synthetic construct
  misc_feature 1..14: note = Antisense oligonucleotide
  source 1..14: mol_type = other RNA
ttggctcctgaact

SEQ ID NO: 2383 - RNA, 14 nt, synthetic construct
  misc_feature 1..14: note = Antisense oligonucleotide
  source 1..14: mol_type = other RNA
cctgtccacccatc

SEQ ID NO: 2384 - RNA, 14 nt, synthetic construct
  misc_feature 1..14: note = Antisense oligonucleotide
  source 1..14: mol_type = other RNA
cccctgtgctcact

SEQ ID NO: 2385 - RNA, 14 nt, synthetic construct
  misc_feature 1..14: note = Antisense oligonucleotide
  source 1..14: mol_type = other RNA
ccgacgagcagcga

SEQ ID NO: 2386 - RNA, 14 nt, synthetic construct
  misc_feature 1..14: note = Antisense oligonucleotide
  source 1..14: mol_type = other RNA
tgcaacgatccgta

SEQ ID NO: 2387 - RNA, 14 nt, synthetic construct
  misc_feature 1..14: note = Antisense oligonucleotide
  source 1..14: mol_type = other RNA
ttggctcctgaact

SEQ ID NO: 2388 - RNA, 14 nt, synthetic construct
  misc_feature 1..14: note = Antisense oligonucleotide
  source 1..14: mol_type = other RNA
cctgtccacccatc

SEQ ID NO: 2389 - RNA, 14 nt, synthetic construct
  misc_feature 1..14: note = Antisense oligonucleotide
  source 1..14: mol_type = other RNA
ccgacgagcagcga

SEQ ID NO: 2390 - RNA, 14 nt, synthetic construct
  misc_feature 1..14: note = Antisense oligonucleotide
  source 1..14: mol_type = other RNA
tgcaacgatccgta

SEQ ID NO: 2391 - RNA, 14 nt, synthetic construct
  misc_feature 1..14: note = Antisense oligonucleotide
  source 1..14: mol_type = other RNA
ttggctcctgaact

SEQ ID NO: 2392 - RNA, 14 nt, synthetic construct
  misc_feature 1..14: note = Antisense oligonucleotide
  source 1..14: mol_type = other RNA
cctgtccacccatc

SEQ ID NO: 2393 - RNA, 14 nt, synthetic construct
  misc_feature 1..14: note = Antisense oligonucleotide
  source 1..14: mol_type = other RNA
ccgacgagcagcga

SEQ ID NO: 2394 - RNA, 14 nt, synthetic construct
  misc_feature 1..14: note = Antisense oligonucleotide
  source 1..14: mol_type = other RNA
tgcaacgatccgta

SEQ ID NO: 2395 - RNA, 14 nt, synthetic construct
  misc_feature 1..14: note = Antisense oligonucleotide
  source 1..14: mol_type = other RNA
ttggctcctgaact

SEQ ID NO: 2396 - RNA, 14 nt, synthetic construct
  misc_feature 1..14: note = Antisense oligonucleotide
  source 1..14: mol_type = other RNA
cctgtccacccatc

SEQ ID NO: 2397 - RNA, 14 nt, synthetic construct
  misc_feature 1..14: note = Antisense oligonucleotide
  source 1..14: mol_type = other RNA
tgcaacgatccgta

SEQ ID NO: 2398 - RNA, 14 nt, synthetic construct
  misc_feature 1..14: note = Antisense oligonucleotide
  source 1..14: mol_type = other RNA
ttggctcctgaact

SEQ ID NO: 2399 - RNA, 14 nt, synthetic construct
  misc_feature 1..14: note = Antisense oligonucleotide
  source 1..14: mol_type = other RNA
cctgtccacccatc

SEQ ID NO: 2400 - RNA, 14 nt, synthetic construct
  misc_feature 1..14: note = Antisense oligonucleotide
  source 1..14: mol_type = other RNA
ccgacgagcagcga

SEQ ID NO: 2401 - RNA, 14 nt, synthetic construct
  misc_feature 1..14: note = Antisense oligonucleotide
  source 1..14: mol_type = other RNA
tgcaacgatccgta

SEQ ID NO: 2402 - RNA, 14 nt, synthetic construct
  misc_feature 1..14: note = Antisense oligonucleotide
  source 1..14: mol_type = other RNA
ccgacgagcagcga

SEQ ID NO: 2403 - RNA, 14 nt, synthetic construct
  misc_feature 1..14: note = Antisense oligonucleotide
  source 1..14: mol_type = other RNA
tgcaacgatccgta

SEQ ID NO: 2404 - RNA, 14 nt, synthetic construct
  misc_feature 1..14: note = Antisense oligonucleotide
  source 1..14: mol_type = other RNA
ttggctcctgaact

SEQ ID NO: 2405 - RNA, 14 nt, synthetic construct
  misc_feature 1..14: note = Antisense oligonucleotide
  source 1..14: mol_type = other RNA
cctgtccacccatc

SEQ ID NO: 2406 - RNA, 14 nt, synthetic construct
  misc_feature 1..14: note = Antisense oligonucleotide
  source 1..14: mol_type = other RNA
ccgacgagcagcga

SEQ ID NO: 2407 - RNA, 14 nt, synthetic construct
  misc_feature 1..14: note = Antisense oligonucleotide
  source 1..14: mol_type = other RNA
tgcaacgatccgta

SEQ ID NO: 2408 - RNA, 14 nt, synthetic construct
  misc_feature 1..14: note = Antisense oligonucleotide
  source 1..14: mol_type = other RNA
ttggctcctgaact

SEQ ID NO: 2409 - RNA, 14 nt, synthetic construct
  misc_feature 1..14: note = Antisense oligonucleotide
  source 1..14: mol_type = other RNA
cctgtccacccatc

SEQ ID NO: 2410 - RNA, 14 nt, synthetic construct
  misc_feature 1..14: note = Antisense oligonucleotide
  source 1..14: mol_type = other RNA
tgcaacgatccgta

SEQ ID NO: 2411 - RNA, 14 nt, synthetic construct
  misc_feature 1..14: note = Antisense oligonucleotide
  source 1..14: mol_type = other RNA
ttggctcctgaact

SEQ ID NO: 2412 - RNA, 14 nt, synthetic construct
  misc_feature 1..14: note = Antisense oligonucleotide
  source 1..14: mol_type = other RNA
cctgtccacccatc

SEQ ID NO: 2413 - RNA, 14 nt, synthetic construct
  misc_feature 1..14: note = Antisense oligonucleotide
  source 1..14: mol_type = other RNA
ccgacgagcagcga

SEQ ID NO: 2414 - RNA, 14 nt, synthetic construct
  misc_feature 1..14: note = Antisense oligonucleotide
  source 1..14: mol_type = other RNA
tgcaacgatccgta

SEQ ID NO: 2415 - RNA, 14 nt, synthetic construct
  misc_feature 1..14: note = Antisense oligonucleotide
  source 1..14: mol_type = other RNA
ttggctcctgaact

SEQ ID NO: 2416 - RNA, 14 nt, synthetic construct
  misc_feature 1..14: note = Antisense oligonucleotide
  source 1..14: mol_type = other RNA
cctgtccacccatc

SEQ ID NO: 2417 - RNA, 14 nt, synthetic construct
  misc_feature 1..14: note = Antisense oligonucleotide
  source 1..14: mol_type = other RNA
ccgacgagcagcga

SEQ ID NO: 2418 - RNA, 14 nt, synthetic construct
  misc_feature 1..14: note = Antisense oligonucleotide
  source 1..14: mol_type = other RNA
tgcaacgatccgta

SEQ ID NO: 2419 - RNA, 14 nt, synthetic construct
  misc_feature 1..14: note = Antisense oligonucleotide
  source 1..14: mol_type = other RNA
ttggctcctgaact

SEQ ID NO: 2420 - RNA, 14 nt, synthetic construct
  misc_feature 1..14: note = Antisense oligonucleotide
  source 1..14: mol_type = other RNA
cctgtccacccatc

SEQ ID NO: 2421 - RNA, 14 nt, synthetic construct
  misc_feature 1..14: note = Antisense oligonucleotide
  source 1..14: mol_type = other RNA
ccgacgagcagcga

SEQ ID NO: 2422 - RNA, 14 nt, synthetic construct
  misc_feature 1..14: note = Antisense oligonucleotide
  source 1..14: mol_type = other RNA
tgcaacgatccgta

SEQ ID NO: 2423 - RNA, 14 nt, synthetic construct
  misc_feature 1..14: note = Antisense oligonucleotide
  source 1..14: mol_type = other RNA
ttggctcctgaact

SEQ ID NO: 2424 - RNA, 14 nt, synthetic construct
  misc_feature 1..14: note = Antisense oligonucleotide
  source 1..14: mol_type = other RNA
cctgtccacccatc

SEQ ID NO: 2425 - RNA, 14 nt, synthetic construct
  misc_feature 1..14: note = Antisense oligonucleotide
  source 1..14: mol_type = other RNA
tgcaacgatccgta

SEQ ID NO: 2426 - RNA, 14 nt, synthetic construct
  misc_feature 1..14: note = Antisense oligonucleotide
  source 1..14: mol_type = other RNA
ttggctcctgaact

SEQ ID NO: 2427 - RNA, 14 nt, synthetic construct
  misc_feature 1..14: note = Antisense oligonucleotide
  source 1..14: mol_type = other RNA
cctgtccacccatc

SEQ ID NO: 2428 - RNA, 14 nt, synthetic construct
  misc_feature 1..14: note = Antisense oligonucleotide
  source 1..14: mol_type = other RNA
ccgacgagcagcga

SEQ ID NO: 2429 - RNA, 14 nt, synthetic construct
  misc_feature 1..14: note = Antisense oligonucleotide
  source 1..14: mol_type = other RNA
tgcaacgatccgta

SEQ ID NO: 2430 - RNA, 14 nt, synthetic construct
  misc_feature 1..14: note = Antisense oligonucleotide
  source 1..14: mol_type = other RNA
ttggctcctgaact

SEQ ID NO: 2431 - RNA, 14 nt, synthetic construct
  misc_feature 1..14: note = Antisense oligonucleotide
  source 1..14: mol_type = other RNA
cctgtccacccatc

SEQ ID NO: 2432 - RNA, 14 nt, synthetic construct
  misc_feature 1..14: note = Antisense oligonucleotide
  source 1..14: mol_type = other RNA
cccctgtgctcact

SEQ ID NO: 2433 - RNA, 14 nt, synthetic construct
  misc_feature 1..14: note = Antisense oligonucleotide
  source 1..14: mol_type = other RNA
ccgacgagcagcga

SEQ ID NO: 2434 - RNA, 14 nt, synthetic construct
  misc_feature 1..14: note = Antisense oligonucleotide
  source 1..14: mol_type = other RNA
tgcaacgatccgta

SEQ ID NO: 2435 - RNA, 14 nt, synthetic construct
  misc_feature 1..14: note = Antisense oligonucleotide
  source 1..14: mol_type = other RNA
ttggctcctgaact

SEQ ID NO: 2436 - RNA, 14 nt, synthetic construct
  misc_feature 1..14: note = Antisense oligonucleotide
  source 1..14: mol_type = other RNA
cctgtccacccatc

SEQ ID NO: 2437 - RNA, 14 nt, synthetic construct
  misc_feature 1..14: note = Antisense oligonucleotide
  source 1..14: mol_type = other RNA
ccgacgagcagcga

SEQ ID NO: 2438 - RNA, 14 nt, synthetic construct
  misc_feature 1..14: note = Antisense oligonucleotide
  source 1..14: mol_type = other RNA
tgcaacgatccgta

SEQ ID NO: 2439 - RNA, 14 nt, synthetic construct
  misc_feature 1..14: note = Antisense oligonucleotide
  source 1..14: mol_type = other RNA
ttggctcctgaact

SEQ ID NO: 2440 - RNA, 14 nt, synthetic construct
  misc_feature 1..14: note = Antisense oligonucleotide
  source 1..14: mol_type = other RNA
cctgtccacccatc

SEQ ID NO: 2441 - RNA, 14 nt, synthetic construct
  misc_feature 1..14: note = Antisense oligonucleotide
  source 1..14: mol_type = other RNA
tgcaacgatccgta

SEQ ID NO: 2442 - RNA, 14 nt, synthetic construct
  misc_feature 1..14: note = Antisense oligonucleotide
  source 1..14: mol_type = other RNA
ttggctcctgaact

SEQ ID NO: 2443 - RNA, 14 nt, synthetic construct
  misc_feature 1..14: note = Antisense oligonucleotide
  source 1..14: mol_type = other RNA
cctgtccacccatc

SEQ ID NO: 2444 - RNA, 14 nt, synthetic construct
  misc_feature 1..14: note = Antisense oligonucleotide
  source 1..14: mol_type = other RNA
ccgacgagcagcga

SEQ ID NO: 2445 - RNA, 14 nt, synthetic construct
  misc_feature 1..14: note = Antisense oligonucleotide
  source 1..14: mol_type = other RNA
tgcaacgatccgta

SEQ ID NO: 2446 - RNA, 14 nt, synthetic construct
  misc_feature 1..14: note = Antisense oligonucleotide
  source 1..14: mol_type = other RNA
ttggctcctgaact

SEQ ID NO: 2447 - RNA, 14 nt, synthetic construct
  misc_feature 1..14: note = Antisense oligonucleotide
  source 1..14: mol_type = other RNA
cctgtccacccatc

SEQ ID NO: 2448 - RNA, 14 nt, synthetic construct
  misc_feature 1..14: note = Antisense oligonucleotide
  source 1..14: mol_type = other RNA
ccgacgagcagcga

SEQ ID NO: 2449 - RNA, 14 nt, synthetic construct
  misc_feature 1..14: note = Antisense oligonucleotide
  source 1..14: mol_type = other RNA
tgcaacgatccgta

SEQ ID NO: 2450 - RNA, 14 nt, synthetic construct
  misc_feature 1..14: note = Antisense oligonucleotide
  source 1..14: mol_type = other RNA
ttggctcctgaact

SEQ ID NO: 2451 - RNA, 14 nt, synthetic construct
  misc_feature 1..14: note = Antisense oligonucleotide
  source 1..14: mol_type = other RNA
cctgtccacccatc

SEQ ID NO: 2452 - RNA, 14 nt, synthetic construct
  misc_feature 1..14: note = Antisense oligonucleotide
  source 1..14: mol_type = other RNA
ccgacgagcagcga

SEQ ID NO: 2453 - RNA, 14 nt, synthetic construct
  misc_feature 1..14: note = Antisense oligonucleotide
  source 1..14: mol_type = other RNA
tgcaacgatccgta

SEQ ID NO: 2454 - RNA, 14 nt, synthetic construct
  misc_feature 1..14: note = Antisense oligonucleotide
  source 1..14: mol_type = other RNA
ttggctcctgaact

SEQ ID NO: 2455 - RNA, 14 nt, synthetic construct
  misc_feature 1..14: note = Antisense oligonucleotide
  source 1..14: mol_type = other RNA
cctgtccacccatc

SEQ ID NO: 2456 - RNA, 14 nt, synthetic construct
  misc_feature 1..14: note = Antisense oligonucleotide
  source 1..14: mol_type = other RNA
tgcaacgatccgta

SEQ ID NO: 2457 - RNA, 14 nt, synthetic construct
  misc_feature 1..14: note = Antisense oligonucleotide
  source 1..14: mol_type = other RNA
ttggctcctgaact

SEQ ID NO: 2458 - RNA, 14 nt, synthetic construct
  misc_feature 1..14: note = Antisense oligonucleotide
  source 1..14: mol_type = other RNA
cctgtccacccatc

SEQ ID NO: 2459 - RNA, 14 nt, synthetic construct
  misc_feature 1..14: note = Antisense oligonucleotide
  source 1..14: mol_type = other RNA
ccgacgagcagcga

SEQ ID NO: 2460 - RNA, 14 nt, synthetic construct
  misc_feature 1..14: note = Antisense oligonucleotide
  source 1..14: mol_type = other RNA
tgcaacgatccgta

SEQ ID NO: 2461 - RNA, 14 nt, synthetic construct
  misc_feature 1..14: note = Antisense oligonucleotide
  source 1..14: mol_type = other RNA
ccgacgagcagcga

SEQ ID NO: 2462 - RNA, 14 nt, synthetic construct
  misc_feature 1..14: note = Antisense oligonucleotide
  source 1..14: mol_type = other RNA
tgcaacgatccgta

SEQ ID NO: 2463 - RNA, 14 nt, synthetic construct
  misc_feature 1..14: note = Antisense oligonucleotide
  source 1..14: mol_type = other RNA
ttggctcctgaact

SEQ ID NO: 2464 - RNA, 14 nt, synthetic construct
  misc_feature 1..14: note = Antisense oligonucleotide
  source 1..14: mol_type = other RNA
cctgtccacccatc

SEQ ID NO: 2465 - RNA, 14 nt, synthetic construct
  misc_feature 1..14: note = Antisense oligonucleotide
  source 1..14: mol_type = other RNA
ccgacgagcagcga

SEQ ID NO: 2466 - RNA, 14 nt, synthetic construct
  misc_feature 1..14: note = Antisense oligonucleotide
  source 1..14: mol_type = other RNA
tgcaacgatccgta

SEQ ID NO: 2467 - RNA, 14 nt, synthetic construct
  misc_feature 1..14: note = Antisense oligonucleotide
  source 1..14: mol_type = other RNA
ttggctcctgaact

SEQ ID NO: 2468 - RNA, 14 nt, synthetic construct
  misc_feature 1..14: note = Antisense oligonucleotide
  source 1..14: mol_type = other RNA
cctgtccacccatc

SEQ ID NO: 2469 - RNA, 14 nt, synthetic construct
  misc_feature 1..14: note = Antisense oligonucleotide
  source 1..14: mol_type = other RNA
tgcaacgatccgta

SEQ ID NO: 2470 - RNA, 14 nt, synthetic construct
  misc_feature 1..14: note = Antisense oligonucleotide
  source 1..14: mol_type = other RNA
ttggctcctgaact

SEQ ID NO: 2471 - RNA, 14 nt, synthetic construct
  misc_feature 1..14: note = Antisense oligonucleotide
  source 1..14: mol_type = other RNA
cctgtccacccatc

SEQ ID NO: 2472 - RNA, 14 nt, synthetic construct
  misc_feature 1..14: note = Antisense oligonucleotide
  source 1..14: mol_type = other RNA
ccgacgagcagcga

SEQ ID NO: 2473 - RNA, 14 nt, synthetic construct
  misc_feature 1..14: note = Antisense oligonucleotide
  source 1..14: mol_type = other RNA
tgcaacgatccgta

SEQ ID NO: 2474 - RNA, 14 nt, synthetic construct
  misc_feature 1..14: note = Antisense oligonucleotide
  source 1..14: mol_type = other RNA
ttggctcctgaact

SEQ ID NO: 2475 - RNA, 14 nt, synthetic construct
  misc_feature 1..14: note = Antisense oligonucleotide
  source 1..14: mol_type = other RNA
cctgtccacccatc

SEQ ID NO: 2476 - RNA, 14 nt, synthetic construct
  misc_feature 1..14: note = Antisense oligonucleotide
  source 1..14: mol_type = other RNA
ccgacgagcagcga

SEQ ID NO: 2477 - RNA, 14 nt, synthetic construct
  misc_feature 1..14: note = Antisense oligonucleotide
  source 1..14: mol_type = other RNA
tgcaacgatccgta

SEQ ID NO: 2478 - RNA, 14 nt, synthetic construct
  misc_feature 1..14: note = Antisense oligonucleotide
  source 1..14: mol_type = other RNA
ttggctcctgaact

SEQ ID NO: 2479 - RNA, 14 nt, synthetic construct
  misc_feature 1..14: note = Antisense oligonucleotide
  source 1..14: mol_type = other RNA
cctgtccacccatc

SEQ ID NO: 2480 - RNA, 14 nt, synthetic construct
  misc_feature 1..14: note = Antisense oligonucleotide
  source 1..14: mol_type = other RNA
ccgacgagcagcga

SEQ ID NO: 2481 - RNA, 14 nt, synthetic construct
  misc_feature 1..14: note = Antisense oligonucleotide
  source 1..14: mol_type = other RNA
tgcaacgatccgta

SEQ ID NO: 2482 - RNA, 14 nt, synthetic construct
  misc_feature 1..14: note = Antisense oligonucleotide
  source 1..14: mol_type = other RNA
ttggctcctgaact

SEQ ID NO: 2483 - RNA, 14 nt, synthetic construct
  misc_feature 1..14: note = Antisense oligonucleotide
  source 1..14: mol_type = other RNA
cctgtccacccatc

SEQ ID NO: 2484 - RNA, 14 nt, synthetic construct
  misc_feature 1..14: note = Antisense oligonucleotide
  source 1..14: mol_type = other RNA
tgcaacgatccgta

SEQ ID NO: 2485 - RNA, 14 nt, synthetic construct
  misc_feature 1..14: note = Antisense oligonucleotide
  source 1..14: mol_type = other RNA
ttggctcctgaact

SEQ ID NO: 2486 - RNA, 14 nt, synthetic construct
  misc_feature 1..14: note = Antisense oligonucleotide
  source 1..14: mol_type = other RNA
cctgtccacccatc

SEQ ID NO: 2487 - RNA, 14 nt, synthetic construct
  misc_feature 1..14: note = Antisense oligonucleotide
  source 1..14: mol_type = other RNA
ccgacgagcagcga

SEQ ID NO: 2488 - RNA, 14 nt, synthetic construct
  misc_feature 1..14: note = Antisense oligonucleotide
  source 1..14: mol_type = other RNA
tgcaacgatccgta

SEQ ID NO: 2489 - RNA, 14 nt, synthetic construct
  misc_feature 1..14: note = Antisense oligonucleotide
  source 1..14: mol_type = other RNA
ccgacgagcagcga

SEQ ID NO: 2490 - RNA, 14 nt, synthetic construct
  misc_feature 1..14: note = Antisense oligonucleotide
  source 1..14: mol_type = other RNA
tgcaacgatccgta

SEQ ID NO: 2491 - RNA, 14 nt, synthetic construct
  misc_feature 1..14: note = Antisense oligonucleotide
  source 1..14: mol_type = other RNA
ttggctcctgaact

SEQ ID NO: 2492 - RNA, 14 nt, synthetic construct
  misc_feature 1..14: note = Antisense oligonucleotide
  source 1..14: mol_type = other RNA
cctgtccacccatc

SEQ ID NO: 2493 - RNA, 14 nt, synthetic construct
  misc_feature 1..14: note = Antisense oligonucleotide
  source 1..14: mol_type = other RNA
ccgacgagcagcga

SEQ ID NO: 2494 - RNA, 14 nt, synthetic construct
  misc_feature 1..14: note = Antisense oligonucleotide
  source 1..14: mol_type = other RNA
tgcaacgatccgta

SEQ ID NO: 2495 - RNA, 14 nt, synthetic construct
  misc_feature 1..14: note = Antisense oligonucleotide
  source 1..14: mol_type = other RNA
ttggctcctgaact

SEQ ID NO: 2496 - RNA, 14 nt, synthetic construct
  misc_feature 1..14: note = Antisense oligonucleotide
  source 1..14: mol_type = other RNA
cctgtccacccatc

SEQ ID NO: 2497 - RNA, 14 nt, synthetic construct
  misc_feature 1..14: note = Antisense oligonucleotide
  source 1..14: mol_type = other RNA
tgcaacgatccgta

SEQ ID NO: 2498 - RNA, 14 nt, synthetic construct
  misc_feature 1..14: note = Antisense oligonucleotide
  source 1..14: mol_type = other RNA
ttggctcctgaact

SEQ ID NO: 2499 - RNA, 14 nt, synthetic construct
  misc_feature 1..14: note = Antisense oligonucleotide
  source 1..14: mol_type = other RNA
cctgtccacccatc

SEQ ID NO: 2500 - RNA, 14 nt, synthetic construct
  misc_feature 1..14: note = Antisense oligonucleotide
  source 1..14: mol_type = other RNA
ccgacgagcagcga

SEQ ID NO: 2501 - RNA, 14 nt, synthetic construct
  misc_feature 1..14: note = Antisense oligonucleotide
  source 1..14: mol_type = other RNA
tgcaacgatccgta

SEQ ID NO: 2502 - RNA, 14 nt, synthetic construct
  misc_feature 1..14: note = Antisense oligonucleotide
  source 1..14: mol_type = other RNA
ttggctcctgaact

SEQ ID NO: 2503 - RNA, 14 nt, synthetic construct
  misc_feature 1..14: note = Antisense oligonucleotide
  source 1..14: mol_type = other RNA
cctgtccacccatc

SEQ ID NO: 2504 - RNA, 14 nt, synthetic construct
  misc_feature 1..14: note = Antisense oligonucleotide
  source 1..14: mol_type = other RNA
ccgacgagcagcga

SEQ ID NO: 2505 - RNA, 14 nt, synthetic construct
  misc_feature 1..14: note = Antisense oligonucleotide
  source 1..14: mol_type = other RNA
tgcaacgatccgta

SEQ ID NO: 2506 - RNA, 14 nt, synthetic construct
  misc_feature 1..14: note = Antisense oligonucleotide
  source 1..14: mol_type = other RNA
ttggctcctgaact

SEQ ID NO: 2507 - RNA, 14 nt, synthetic construct
  misc_feature 1..14: note = Antisense oligonucleotide
  source 1..14: mol_type = other RNA
cctgtccacccatc

SEQ ID NO: 2508 - RNA, 14 nt, synthetic construct
  misc_feature 1..14: note = Antisense oligonucleotide
  source 1..14: mol_type = other RNA
ccgacgagcagcga

SEQ ID NO: 2509 - RNA, 14 nt, synthetic construct
  misc_feature 1..14: note = Antisense oligonucleotide
  source 1..14: mol_type = other RNA
tgcaacgatccgta

SEQ ID NO: 2510 - RNA, 14 nt, synthetic construct
  misc_feature 1..14: note = Antisense oligonucleotide
  source 1..14: mol_type = other RNA
ttggctcctgaact

SEQ ID NO: 2511 - RNA, 14 nt, synthetic construct
  misc_feature 1..14: note = Antisense oligonucleotide
  source 1..14: mol_type = other RNA
cctgtccacccatc

SEQ ID NO: 2512 - RNA, 14 nt, synthetic construct
  misc_feature 1..14: note = Antisense oligonucleotide
  source 1..14: mol_type = other RNA
tgcaacgatccgta

SEQ ID NO: 2513 - RNA, 14 nt, synthetic construct
  misc_feature 1..14: note = Antisense oligonucleotide
  source 1..14: mol_type = other RNA
ttggctcctgaact

SEQ ID NO: 2514 - RNA, 14 nt, synthetic construct
  misc_feature 1..14: note = Antisense oligonucleotide
  source 1..14: mol_type = other RNA
cctgtccacccatc

SEQ ID NO: 2515 - RNA, 14 nt, synthetic construct
  misc_feature 1..14: note = Antisense oligonucleotide
  source 1..14: mol_type = other RNA
ccgacgagcagcga

SEQ ID NO: 2516 - RNA, 14 nt, synthetic construct
  misc_feature 1..14: note = Antisense oligonucleotide
  source 1..14: mol_type = other RNA
tgcaacgatccgta

SEQ ID NO: 2517 - RNA, 14 nt, synthetic construct
  misc_feature 1..14: note = Antisense oligonucleotide
  source 1..14: mol_type = other RNA
ccgacgagcagcga

SEQ ID NO: 2518 - RNA, 14 nt, synthetic construct
  misc_feature 1..14: note = Antisense oligonucleotide
  source 1..14: mol_type = other RNA
tgcaacgatccgta

SEQ ID NO: 2519 - RNA, 14 nt, synthetic construct
  misc_feature 1..14: note = Antisense oligonucleotide
  source 1..14: mol_type = other RNA
ttggctcctgaact

SEQ ID NO: 2520 - RNA, 14 nt, synthetic construct
  misc_feature 1..14: note = Antisense oligonucleotide
  source 1..14: mol_type = other RNA
cctgtccacccatc

SEQ ID NO: 2521 - RNA, 14 nt, synthetic construct
  misc_feature 1..14: note = Antisense oligonucleotide
  source 1..14: mol_type = other RNA
ccgacgagcagcga

SEQ ID NO: 2522 - RNA, 14 nt, synthetic construct
  misc_feature 1..14: note = Antisense oligonucleotide
  source 1..14: mol_type = other RNA
tgcaacgatccgta

SEQ ID NO: 2523 - RNA, 14 nt, synthetic construct
  misc_feature 1..14: note = Antisense oligonucleotide
  source 1..14: mol_type = other RNA
ttggctcctgaact

SEQ ID NO: 2524 - RNA, 14 nt, synthetic construct
  misc_feature 1..14: note = Antisense oligonucleotide
  source 1..14: mol_type = other RNA
cctgtccacccatc

SEQ ID NO: 2525 - RNA, 14 nt, synthetic construct
  misc_feature 1..14: note = Antisense oligonucleotide
  source 1..14: mol_type = other RNA
tgcaacgatccgta

SEQ ID NO: 2526 - RNA, 14 nt, synthetic construct
  misc_feature 1..14: note = Antisense oligonucleotide
  source 1..14: mol_type = other RNA
ttggctcctgaact

SEQ ID NO: 2527 - RNA, 14 nt, synthetic construct
  misc_feature 1..14: note = Antisense oligonucleotide
  source 1..14: mol_type = other RNA
cctgtccacccatc

SEQ ID NO: 2528 - RNA, 14 nt, synthetic construct
  misc_feature 1..14: note = Antisense oligonucleotide
  source 1..14: mol_type = other RNA
ccgacgagcagcga

SEQ ID NO: 2529 - RNA, 14 nt, synthetic construct
  misc_feature 1..14: note = Antisense oligonucleotide
  source 1..14: mol_type = other RNA
tgcaacgatccgta

SEQ ID NO: 2530 - RNA, 14 nt, synthetic construct
  misc_feature 1..14: note = Antisense oligonucleotide
  source 1..14: mol_type = other RNA
ttggctcctgaact

SEQ ID NO: 2531 - RNA, 14 nt, synthetic construct
  misc_feature 1..14: note = Antisense oligonucleotide
  source 1..14: mol_type = other RNA
cctgtccacccatc

SEQ ID NO: 2532 - RNA, 14 nt, synthetic construct
  misc_feature 1..14: note = Antisense oligonucleotide
  source 1..14: mol_type = other RNA
ccgacgagcagcga

SEQ ID NO: 2533 - RNA, 14 nt, synthetic construct
  misc_feature 1..14: note = Antisense oligonucleotide
  source 1..14: mol_type = other RNA
tgcaacgatccgta

SEQ ID NO: 2534 - RNA, 14 nt, synthetic construct
  misc_feature 1..14: note = Antisense oligonucleotide
  source 1..14: mol_type = other RNA
ttggctcctgaact

SEQ ID NO: 2535 - RNA, 14 nt, synthetic construct
  misc_feature 1..14: note = Antisense oligonucleotide
  source 1..14: mol_type = other RNA
cctgtccacccatc

SEQ ID NO: 2536 - RNA, 14 nt, synthetic construct
  misc_feature 1..14: note = Antisense oligonucleotide
  source 1..14: mol_type = other RNA
ccgacgagcagcga

SEQ ID NO: 2537 - RNA, 14 nt, synthetic construct
  misc_feature 1..14: note = Antisense oligonucleotide
  source 1..14: mol_type = other RNA
tgcaacgatccgta

SEQ ID NO: 2538 - RNA, 14 nt, synthetic construct
  misc_feature 1..14: note = Antisense oligonucleotide
  source 1..14: mol_type = other RNA
ttggctcctgaact

SEQ ID NO: 2539 - RNA, 14 nt, synthetic construct
  misc_feature 1..14: note = Antisense oligonucleotide
  source 1..14: mol_type = other RNA
cctgtccacccatc

SEQ ID NO: 2540 - RNA, 14 nt, synthetic construct
  misc_feature 1..14: note = Antisense oligonucleotide
  source 1..14: mol_type = other RNA
tgcaacgatccgta

SEQ ID NO: 2541 - RNA, 14 nt, synthetic construct
  misc_feature 1..14: note = Antisense oligonucleotide
  source 1..14: mol_type = other RNA
ccgacgagcagcga

SEQ ID NO: 2542 - RNA, 14 nt, synthetic construct
  misc_feature 1..14: note = Antisense oligonucleotide
  source 1..14: mol_type = other RNA
tgcaacgatccgta

SEQ ID NO: 2543 - RNA, 14 nt, synthetic construct
  misc_feature 1..14: note = Antisense oligonucleotide
  source 1..14: mol_type = other RNA
ttggctcctgaact

SEQ ID NO: 2544 - RNA, 14 nt, synthetic construct
  misc_feature 1..14: note = Antisense oligonucleotide
  source 1..14: mol_type = other RNA
cctgtccacccatc

SEQ ID NO: 2545 - RNA, 14 nt, synthetic construct
  misc_feature 1..14: note = Antisense oligonucleotide
  source 1..14: mol_type = other RNA
ccgacgagcagcga

SEQ ID NO: 2546 - RNA, 14 nt, synthetic construct
  misc_feature 1..14: note = Antisense oligonucleotide
  source 1..14: mol_type = other RNA
tgcaacgatccgta

SEQ ID NO: 2547 - RNA, 14 nt, synthetic construct
  misc_feature 1..14: note = Antisense oligonucleotide
  source 1..14: mol_type = other RNA
ttggctcctgaact

SEQ ID NO: 2548 - RNA, 14 nt, synthetic construct
  misc_feature 1..14: note = Antisense oligonucleotide
  source 1..14: mol_type = other RNA
cctgtccacccatc

SEQ ID NO: 2549 - RNA, 14 nt, synthetic construct
  misc_feature 1..14: note = Antisense oligonucleotide
  source 1..14: mol_type = other RNA
tgcaacgatccgta

SEQ ID NO: 2550 - RNA, 14 nt, synthetic construct
  misc_feature 1..14: note = Antisense oligonucleotide
  source 1..14: mol_type = other RNA
ttggctcctgaact

SEQ ID NO: 2551 - RNA, 14 nt, synthetic construct
  misc_feature 1..14: note = Antisense oligonucleotide
  source 1..14: mol_type = other RNA
cctgtccacccatc

SEQ ID NO: 2552 - RNA, 14 nt, synthetic construct
  misc_feature 1..14: note = Antisense oligonucleotide
  source 1..14: mol_type = other RNA
ccgacgagcagcga

SEQ ID NO: 2553 - RNA, 14 nt, synthetic construct
  misc_feature 1..14: note = Antisense oligonucleotide
  source 1..14: mol_type = other RNA
tgcaacgatccgta

SEQ ID NO: 2554 - RNA, 14 nt, synthetic construct
  misc_feature 1..14: note = Antisense oligonucleotide
  source 1..14: mol_type = other RNA
ttggctcctgaact

SEQ ID NO: 2555 - RNA, 14 nt, synthetic construct
  misc_feature 1..14: note = Antisense oligonucleotide
  source 1..14: mol_type = other RNA
cctgtccacccatc

SEQ ID NO: 2556 - RNA, 14 nt, synthetic construct
  misc_feature 1..14: note = Antisense oligonucleotide
  source 1..14: mol_type = other RNA
ccgacgagcagcga

SEQ ID NO: 2557 - RNA, 14 nt, synthetic construct
  misc_feature 1..14: note = Antisense oligonucleotide
  source 1..14: mol_type = other RNA
tgcaacgatccgta

SEQ ID NO: 2558 - RNA, 14 nt, synthetic construct
  misc_feature 1..14: note = Antisense oligonucleotide
  source 1..14: mol_type = other RNA
ttggctcctgaact

SEQ ID NO: 2559 - RNA, 14 nt, synthetic construct
  misc_feature 1..14: note = Antisense oligonucleotide
  source 1..14: mol_type = other RNA
cctgtccacccatc

SEQ ID NO: 2560 - RNA, 14 nt, synthetic construct
  misc_feature 1..14: note = Antisense oligonucleotide
  source 1..14: mol_type = other RNA
ccgacgagcagcga

SEQ ID NO: 2561 - RNA, 14 nt, synthetic construct
  misc_feature 1..14: note = Antisense oligonucleotide
  source 1..14: mol_type = other RNA
tgcaacgatccgta

SEQ ID NO: 2562 - RNA, 14 nt, synthetic construct
  misc_feature 1..14: note = Antisense oligonucleotide
  source 1..14: mol_type = other RNA
ttggctcctgaact

SEQ ID NO: 2563 - RNA, 14 nt, synthetic construct
  misc_feature 1..14: note = Antisense oligonucleotide
  source 1..14: mol_type = other RNA
cctgtccacccatc

SEQ ID NO: 2564 - RNA, 14 nt, synthetic construct
  misc_feature 1..14: note = Antisense oligonucleotide
  source 1..14: mol_type = other RNA
tgcaacgatccgta

SEQ ID NO: 2565 - RNA, 14 nt, synthetic construct
  misc_feature 1..14: note = Antisense oligonucleotide
  source 1..14: mol_type = other RNA
ttggctcctgaact

SEQ ID NO: 2566 - RNA, 14 nt, synthetic construct
  misc_feature 1..14: note = Antisense oligonucleotide
  source 1..14: mol_type = other RNA
cctgtccacccatc

SEQ ID NO: 2567 - RNA, 14 nt, synthetic construct
  misc_feature 1..14: note = Antisense oligonucleotide
  source 1..14: mol_type = other RNA
ccgacgagcagcga

SEQ ID NO: 2568 - RNA, 14 nt, synthetic construct
  misc_feature 1..14: note = Antisense oligonucleotide
  source 1..14: mol_type = other RNA
tgcaacgatccgta

SEQ ID NO: 2569 - RNA, 14 nt, synthetic construct
  misc_feature 1..14: note = Antisense oligonucleotide
  source 1..14: mol_type = other RNA
ccgacgagcagcga

SEQ ID NO: 2570 - RNA, 14 nt, synthetic construct
  misc_feature 1..14: note = Antisense oligonucleotide
  source 1..14: mol_type = other RNA
tgcaacgatccgta

SEQ ID NO: 2571 - RNA, 14 nt, synthetic construct
  misc_feature 1..14: note = Antisense oligonucleotide
  source 1..14: mol_type = other RNA
ttggctcctgaact

SEQ ID NO: 2572 - RNA, 14 nt, synthetic construct
  misc_feature 1..14: note = Antisense oligonucleotide
  source 1..14: mol_type = other RNA
cctgtccacccatc

SEQ ID NO: 2573 - RNA, 14 nt, synthetic construct
  misc_feature 1..14: note = Antisense oligonucleotide
  source 1..14: mol_type = other RNA
ccgacgagcagcga

SEQ ID NO: 2574 - RNA, 14 nt, synthetic construct
  misc_feature 1..14: note = Antisense oligonucleotide
  source 1..14: mol_type = other RNA
tgcaacgatccgta

SEQ ID NO: 2575 - RNA, 14 nt, synthetic construct
  misc_feature 1..14: note = Antisense oligonucleotide
  source 1..14: mol_type = other RNA
ttggctcctgaact

SEQ ID NO: 2576 - RNA, 14 nt, synthetic construct
  misc_feature 1..14: note = Antisense oligonucleotide
  source 1..14: mol_type = other RNA
cctgtccacccatc

SEQ ID NO: 2577 - RNA, 14 nt, synthetic construct
  misc_feature 1..14: note = Antisense oligonucleotide
  source 1..14: mol_type = other RNA
tgcaacgatccgta

SEQ ID NO: 2578 - RNA, 14 nt, synthetic construct
  misc_feature 1..14: note = Antisense oligonucleotide
  source 1..14: mol_type = other RNA
ttggctcctgaact

SEQ ID NO: 2579 - RNA, 14 nt, synthetic construct
  misc_feature 1..14: note = Antisense oligonucleotide
  source 1..14: mol_type = other RNA
cctgtccacccatc

SEQ ID NO: 2580 - RNA, 14 nt, synthetic construct
  misc_feature 1..14: note = Antisense oligonucleotide
  source 1..14: mol_type = other RNA
ccgacgagcagcga

SEQ ID NO: 2581 - RNA, 14 nt, synthetic construct
  misc_feature 1..14: note = Antisense oligonucleotide
  source 1..14: mol_type = other RNA
tgcaacgatccgta

SEQ ID NO: 2582 - RNA, 14 nt, synthetic construct
  misc_feature 1..14: note = Antisense oligonucleotide
  source 1..14: mol_type = other RNA
ttggctcctgaact

SEQ ID NO: 2583 - RNA, 14 nt, synthetic construct
  misc_feature 1..14: note = Antisense oligonucleotide
  source 1..14: mol_type = other RNA
cctgtccacccatc

SEQ ID NO: 2584 - RNA, 14 nt, synthetic construct
  misc_feature 1..14: note = Antisense oligonucleotide
  source 1..14: mol_type = other RNA
ccgacgagcagcga

SEQ ID NO: 2585 - RNA, 14 nt, synthetic construct
  misc_feature 1..14: note = Antisense oligonucleotide
  source 1..14: mol_type = other RNA
tgcaacgatccgta

SEQ ID NO: 2586 - RNA, 14 nt, synthetic construct
  misc_feature 1..14: note = Antisense oligonucleotide
  source 1..14: mol_type = other RNA
ttggctcctgaact

SEQ ID NO: 2587 - RNA, 14 nt, synthetic construct
  misc_feature 1..14: note = Antisense oligonucleotide
  source 1..14: mol_type = other RNA
cctgtccacccatc

SEQ ID NO: 2588 - RNA, 14 nt, synthetic construct
  misc_feature 1..14: note = Antisense oligonucleotide
  source 1..14: mol_type = other RNA
ccgacgagcagcga

SEQ ID NO: 2589 - RNA, 14 nt, synthetic construct
  misc_feature 1..14: note = Antisense oligonucleotide
  source 1..14: mol_type = other RNA
tgcaacgatccgta

SEQ ID NO: 2590 - RNA, 14 nt, synthetic construct
  misc_feature 1..14: note = Antisense oligonucleotide
  source 1..14: mol_type = other RNA
ttggctcctgaact

SEQ ID NO: 2591 - RNA, 14 nt, synthetic construct
  misc_feature 1..14: note = Antisense oligonucleotide
  source 1..14: mol_type = other RNA
cctgtccacccatc

SEQ ID NO: 2592 - RNA, 14 nt, synthetic construct
  misc_feature 1..14: note = Antisense oligonucleotide
  source 1..14: mol_type = other RNA
tgcaacgatccgta

SEQ ID NO: 2593 - RNA, 14 nt, synthetic construct
  misc_feature 1..14: note = Antisense oligonucleotide
  source 1..14: mol_type = other RNA
ttggctcctgaact

SEQ ID NO: 2594 - RNA, 14 nt, synthetic construct
  misc_feature 1..14: note = Antisense oligonucleotide
  source 1..14: mol_type = other RNA
cctgtccacccatc

SEQ ID NO: 2595 - RNA, 14 nt, synthetic construct
  misc_feature 1..14: note = Antisense oligonucleotide
  source 1..14: mol_type = other RNA
ccgacgagcagcga

SEQ ID NO: 2596 - RNA, 14 nt, synthetic construct
  misc_feature 1..14: note = Antisense oligonucleotide
  source 1..14: mol_type = other RNA
tgcaacgatccgta

SEQ ID NO: 2597 - RNA, 14 nt, synthetic construct
  misc_feature 1..14: note = Antisense oligonucleotide
  source 1..14: mol_type = other RNA
ttggctcctgaact

SEQ ID NO: 2598 - RNA, 14 nt, synthetic construct
  misc_feature 1..14: note = Antisense oligonucleotide
  source 1..14: mol_type = other RNA
cctgtccacccatc

SEQ ID NO: 2599 - RNA, 14 nt, synthetic construct
  misc_feature 1..14: note = Antisense oligonucleotide
  source 1..14: mol_type = other RNA
cccctgtgctcact

SEQ ID NO: 2600 - RNA, 14 nt, synthetic construct
  misc_feature 1..14: note = Antisense oligonucleotide
  source 1..14: mol_type = other RNA
ccgacgagcagcga

SEQ ID NO: 2601 - RNA, 14 nt, synthetic construct
  misc_feature 1..14: note = Antisense oligonucleotide
  source 1..14: mol_type = other RNA
tgcaacgatccgta

SEQ ID NO: 2602 - RNA, 14 nt, synthetic construct
  misc_feature 1..14: note = Antisense oligonucleotide
  source 1..14: mol_type = other RNA
ttggctcctgaact

SEQ ID NO: 2603 - RNA, 14 nt, synthetic construct
  misc_feature 1..14: note = Antisense oligonucleotide
  source 1..14: mol_type = other RNA
cctgtccacccatc

SEQ ID NO: 2604 - RNA, 14 nt, synthetic construct
  misc_feature 1..14: note = Antisense oligonucleotide
  source 1..14: mol_type = other RNA
ccgacgagcagcga

SEQ ID NO: 2605 - RNA, 14 nt, synthetic construct
  misc_feature 1..14: note = Antisense oligonucleotide
  source 1..14: mol_type = other RNA
tgcaacgatccgta

SEQ ID NO: 2606 - RNA, 14 nt, synthetic construct
  misc_feature 1..14: note = Antisense oligonucleotide
  source 1..14: mol_type = other RNA
ttggctcctgaact

SEQ ID NO: 2607 - RNA, 14 nt, synthetic construct
  misc_feature 1..14: note = Antisense oligonucleotide
  source 1..14: mol_type = other RNA
cctgtccacccatc

SEQ ID NO: 2608 - RNA, 14 nt, synthetic construct
  misc_feature 1..14: note = Antisense oligonucleotide
  source 1..14: mol_type = other RNA
tgcaacgatccgta

SEQ ID NO: 2609 - RNA, 14 nt, synthetic construct
  misc_feature 1..14: note = Antisense oligonucleotide
  source 1..14: mol_type = other RNA
ttggctcctgaact

SEQ ID NO: 2610 - RNA, 14 nt, synthetic construct
  misc_feature 1..14: note = Antisense oligonucleotide
  source 1..14: mol_type = other RNA
cctgtccacccatc

SEQ ID NO: 2611 - RNA, 14 nt, synthetic construct
  misc_feature 1..14: note = Antisense oligonucleotide
  source 1..14: mol_type = other RNA
ccgacgagcagcga

SEQ ID NO: 2612 - RNA, 14 nt, synthetic construct
  misc_feature 1..14: note = Antisense oligonucleotide
  source 1..14: mol_type = other RNA
tgcaacgatccgta

SEQ ID NO: 2613 - RNA, 14 nt, synthetic construct
  misc_feature 1..14: note = Antisense oligonucleotide
  source 1..14: mol_type = other RNA
ttggctcctgaact

SEQ ID NO: 2614 - RNA, 14 nt, synthetic construct
  misc_feature 1..14: note = Antisense oligonucleotide
  source 1..14: mol_type = other RNA
cctgtccacccatc

SEQ ID NO: 2615 - RNA, 14 nt, synthetic construct
  misc_feature 1..14: note = Antisense oligonucleotide
  source 1..14: mol_type = other RNA
ccgacgagcagcga

SEQ ID NO: 2616 - RNA, 14 nt, synthetic construct
  misc_feature 1..14: note = Antisense oligonucleotide
  source 1..14: mol_type = other RNA
tgcaacgatccgta

SEQ ID NO: 2617 - RNA, 14 nt, synthetic construct
  misc_feature 1..14: note = Antisense oligonucleotide
  source 1..14: mol_type = other RNA
ttggctcctgaact

SEQ ID NO: 2618 - RNA, 14 nt, synthetic construct
  misc_feature 1..14: note = Antisense oligonucleotide
  source 1..14: mol_type = other RNA
cctgtccacccatc

SEQ ID NO: 2619 - RNA, 14 nt, synthetic construct
  misc_feature 1..14: note = Antisense oligonucleotide
  source 1..14: mol_type = other RNA
ccgacgagcagcga

SEQ ID NO: 2620 - RNA, 14 nt, synthetic construct
  misc_feature 1..14: note = Antisense oligonucleotide
  source 1..14: mol_type = other RNA
tgcaacgatccgta

SEQ ID NO: 2621 - RNA, 14 nt, synthetic construct
  misc_feature 1..14: note = Antisense oligonucleotide
  source 1..14: mol_type = other RNA
ttggctcctgaact

SEQ ID NO: 2622 - RNA, 14 nt, synthetic construct
  misc_feature 1..14: note = Antisense oligonucleotide
  source 1..14: mol_type = other RNA
cctgtccacccatc

SEQ ID NO: 2623 - RNA, 14 nt, synthetic construct
  misc_feature 1..14: note = Antisense oligonucleotide
  source 1..14: mol_type = other RNA
tgcaacgatccgta

SEQ ID NO: 2624 - RNA, 14 nt, synthetic construct
  misc_feature 1..14: note = Antisense oligonucleotide
  source 1..14: mol_type = other RNA
ttggctcctgaact

SEQ ID NO: 2625 - RNA, 14 nt, synthetic construct
  misc_feature 1..14: note = Antisense oligonucleotide
  source 1..14: mol_type = other RNA
cctgtccacccatc

SEQ ID NO: 2626 - RNA, 14 nt, synthetic construct
  misc_feature 1..14: note = Antisense oligonucleotide
  source 1..14: mol_type = other RNA
ccgacgagcagcga

SEQ ID NO: 2627 - RNA, 14 nt, synthetic construct
  misc_feature 1..14: note = Antisense oligonucleotide
  source 1..14: mol_type = other RNA
tgcaacgatccgta

SEQ ID NO: 2628 - RNA, 14 nt, synthetic construct
  misc_feature 1..14: note = Antisense oligonucleotide
  source 1..14: mol_type = other RNA
ccgacgagcagcga

SEQ ID NO: 2629 - RNA, 14 nt, synthetic construct
  misc_feature 1..14: note = Antisense oligonucleotide
  source 1..14: mol_type = other RNA
tgcaacgatccgta

SEQ ID NO: 2630 - RNA, 14 nt, synthetic construct
  misc_feature 1..14: note = Antisense oligonucleotide
  source 1..14: mol_type = other RNA
ttggctcctgaact

SEQ ID NO: 2631 - RNA, 14 nt, synthetic construct
  misc_feature 1..14: note = Antisense oligonucleotide
  source 1..14: mol_type = other RNA
cctgtccacccatc

SEQ ID NO: 2632 - RNA, 14 nt, synthetic construct
  misc_feature 1..14: note = Antisense oligonucleotide
  source 1..14: mol_type = other RNA
ccgacgagcagcga

SEQ ID NO: 2633 - RNA, 14 nt, synthetic construct
  misc_feature 1..14: note = Antisense oligonucleotide
  source 1..14: mol_type = other RNA
tgcaacgatccgta

SEQ ID NO: 2634 - RNA, 14 nt, synthetic construct
  misc_feature 1..14: note = Antisense oligonucleotide
  source 1..14: mol_type = other RNA
ttggctcctgaact

SEQ ID NO: 2635 - RNA, 14 nt, synthetic construct
  misc_feature 1..14: note = Antisense oligonucleotide
  source 1..14: mol_type = other RNA
cctgtccacccatc

SEQ ID NO: 2636 - RNA, 14 nt, synthetic construct
  misc_feature 1..14: note = Antisense oligonucleotide
  source 1..14: mol_type = other RNA
tgcaacgatccgta

SEQ ID NO: 2637 - RNA, 14 nt, synthetic construct
  misc_feature 1..14: note = Antisense oligonucleotide
  source 1..14: mol_type = other RNA
ttggctcctgaact

SEQ ID NO: 2638 - RNA, 14 nt, synthetic construct
  misc_feature 1..14: note = Antisense oligonucleotide
  source 1..14: mol_type = other RNA
cctgtccacccatc

SEQ ID NO: 2639 - RNA, 14 nt, synthetic construct
  misc_feature 1..14: note = Antisense oligonucleotide
  source 1..14: mol_type = other RNA
ccgacgagcagcga

SEQ ID NO: 2640 - RNA, 14 nt, synthetic construct
  misc_feature 1..14: note = Antisense oligonucleotide
  source 1..14: mol_type = other RNA
tgcaacgatccgta

SEQ ID NO: 2641 - RNA, 14 nt, synthetic construct
  misc_feature 1..14: note = Antisense oligonucleotide
  source 1..14: mol_type = other RNA
ttggctcctgaact

SEQ ID NO: 2642 - RNA, 14 nt, synthetic construct
  misc_feature 1..14: note = Antisense oligonucleotide
  source 1..14: mol_type = other RNA
cctgtccacccatc

SEQ ID NO: 2643 - RNA, 14 nt, synthetic construct
  misc_feature 1..14: note = Antisense oligonucleotide
  source 1..14: mol_type = other RNA
ccgacgagcagcga

SEQ ID NO: 2644 - RNA, 14 nt, synthetic construct
  misc_feature 1..14: note = Antisense oligonucleotide
  source 1..14: mol_type = other RNA
tgcaacgatccgta

SEQ ID NO: 2645 - RNA, 14 nt, synthetic construct
  misc_feature 1..14: note = Antisense oligonucleotide
  source 1..14: mol_type = other RNA
ttggctcctgaact

SEQ ID NO: 2646 - RNA, 14 nt, synthetic construct
  misc_feature 1..14: note = Antisense oligonucleotide
  source 1..14: mol_type = other RNA
cctgtccacccatc

SEQ ID NO: 2647 - RNA, 14 nt, synthetic construct
  misc_feature 1..14: note = Antisense oligonucleotide
  source 1..14: mol_type = other RNA
ccgacgagcagcga

SEQ ID NO: 2648 - RNA, 14 nt, synthetic construct
  misc_feature 1..14: note = Antisense oligonucleotide
  source 1..14: mol_type = other RNA
tgcaacgatccgta

SEQ ID NO: 2649 - RNA, 14 nt, synthetic construct
  misc_feature 1..14: note = Antisense oligonucleotide
  source 1..14: mol_type = other RNA
ttggctcctgaact

SEQ ID NO: 2650 - RNA, 14 nt, synthetic construct
  misc_feature 1..14: note = Antisense oligonucleotide
  source 1..14: mol_type = other RNA
cctgtccacccatc

SEQ ID NO: 2651 - RNA, 14 nt, synthetic construct
  misc_feature 1..14: note = Antisense oligonucleotide
  source 1..14: mol_type = other RNA
tgcaacgatccgta

SEQ ID NO: 2652 - RNA, 14 nt, synthetic construct
  misc_feature 1..14: note = Antisense oligonucleotide
  source 1..14: mol_type = other RNA
ttggctcctgaact

SEQ ID NO: 2653 - RNA, 14 nt, synthetic construct
  misc_feature 1..14: note = Antisense oligonucleotide
  source 1..14: mol_type = other RNA
cctgtccacccatc

SEQ ID NO: 2654 - RNA, 14 nt, synthetic construct
  misc_feature 1..14: note = Antisense oligonucleotide
  source 1..14: mol_type = other RNA
ccgacgagcagcga

SEQ ID NO: 2655 - RNA, 14 nt, synthetic construct
  misc_feature 1..14: note = Antisense oligonucleotide
  source 1..14: mol_type = other RNA
tgcaacgatccgta

SEQ ID NO: 2656 - RNA, 14 nt, synthetic construct
  misc_feature 1..14: note = Antisense oligonucleotide
  source 1..14: mol_type = other RNA
ttggctcctgaact

SEQ ID NO: 2657 - RNA, 14 nt, synthetic construct
  misc_feature 1..14: note = Antisense oligonucleotide
  source 1..14: mol_type = other RNA
cctgtccacccatc

SEQ ID NO: 2658 - RNA, 14 nt, synthetic construct
  misc_feature 1..14: note = Antisense oligonucleotide
  source 1..14: mol_type = other RNA
cccctgtgctcact

SEQ ID NO: 2659 - RNA, 14 nt, synthetic construct
  misc_feature 1..14: note = Antisense oligonucleotide
  source 1..14: mol_type = other RNA
ccgacgagcagcga

SEQ ID NO: 2660 - RNA, 14 nt, synthetic construct
  misc_feature 1..14: note = Antisense oligonucleotide
  source 1..14: mol_type = other RNA
tgcaacgatccgta

SEQ ID NO: 2661 - RNA, 14 nt, synthetic construct
  misc_feature 1..14: note = Antisense oligonucleotide
  source 1..14: mol_type = other RNA
ttggctcctgaact

SEQ ID NO: 2662 - RNA, 14 nt, synthetic construct
  misc_feature 1..14: note = Antisense oligonucleotide
  source 1..14: mol_type = other RNA
cctgtccacccatc

SEQ ID NO: 2663 - RNA, 14 nt, synthetic construct
  misc_feature 1..14: note = Antisense oligonucleotide
  source 1..14: mol_type = other RNA
ccgacgagcagcga

SEQ ID NO: 2664 - RNA, 14 nt, synthetic construct
  misc_feature 1..14: note = Antisense oligonucleotide
  source 1..14: mol_type = other RNA
tgcaacgatccgta

SEQ ID NO: 2665 - RNA, 14 nt, synthetic construct
  misc_feature 1..14: note = Antisense oligonucleotide
  source 1..14: mol_type = other RNA
ttggctcctgaact

SEQ ID NO: 2666 - RNA, 14 nt, synthetic construct
  misc_feature 1..14: note = Antisense oligonucleotide
  source 1..14: mol_type = other RNA
cctgtccacccatc

SEQ ID NO: 2667 - RNA, 14 nt, synthetic construct
  misc_feature 1..14: note = Antisense oligonucleotide
  source 1..14: mol_type = other RNA
ccgacgagcagcga

SEQ ID NO: 2668 - RNA, 14 nt, synthetic construct
  misc_feature 1..14: note = Antisense oligonucleotide
  source 1..14: mol_type = other RNA
tgcaacgatccgta

SEQ ID NO: 2669 - RNA, 14 nt, synthetic construct
  misc_feature 1..14: note = Antisense oligonucleotide
  source 1..14: mol_type = other RNA
ttggctcctgaact

SEQ ID NO: 2670 - RNA, 14 nt, synthetic construct
  misc_feature 1..14: note = Antisense oligonucleotide
  source 1..14: mol_type = other RNA
cctgtccacccatc

SEQ ID NO: 2671 - RNA, 14 nt, synthetic construct
  misc_feature 1..14: note = Antisense oligonucleotide
  source 1..14: mol_type = other RNA
tgcaacgatccgta

SEQ ID NO: 2672 - RNA, 14 nt, synthetic construct
  misc_feature 1..14: note = Antisense oligonucleotide
  source 1..14: mol_type = other RNA
ttggctcctgaact

SEQ ID NO: 2673 - RNA, 14 nt, synthetic construct
  misc_feature 1..14: note = Antisense oligonucleotide
  source 1..14: mol_type = other RNA
cctgtccacccatc

SEQ ID NO: 2674 - RNA, 14 nt, synthetic construct
  misc_feature 1..14: note = Antisense oligonucleotide
  source 1..14: mol_type = other RNA
ccgacgagcagcga

SEQ ID NO: 2675 - RNA, 14 nt, synthetic construct
  misc_feature 1..14: note = Antisense oligonucleotide
  source 1..14: mol_type = other RNA
tgcaacgatccgta

SEQ ID NO: 2676 - RNA, 14 nt, synthetic construct
  misc_feature 1..14: note = Antisense oligonucleotide
  source 1..14: mol_type = other RNA
ccgacgagcagcga

SEQ ID NO: 2677 - RNA, 14 nt, synthetic construct
  misc_feature 1..14: note = Antisense oligonucleotide
  source 1..14: mol_type = other RNA
tgcaacgatccgta

SEQ ID NO: 2678 - RNA, 14 nt, synthetic construct
  misc_feature 1..14: note = Antisense oligonucleotide
  source 1..14: mol_type = other RNA
ttggctcctgaact

SEQ ID NO: 2679 - RNA, 14 nt, synthetic construct
  misc_feature 1..14: note = Antisense oligonucleotide
  source 1..14: mol_type = other RNA
cctgtccacccatc

SEQ ID NO: 2680 - RNA, 14 nt, synthetic construct
  misc_feature 1..14: note = Antisense oligonucleotide
  source 1..14: mol_type = other RNA
ccgacgagcagcga

SEQ ID NO: 2681 - RNA, 14 nt, synthetic construct
  misc_feature 1..14: note = Antisense oligonucleotide
  source 1..14: mol_type = other RNA
tgcaacgatccgta

SEQ ID NO: 2682 - RNA, 14 nt, synthetic construct
  misc_feature 1..14: note = Antisense oligonucleotide
  source 1..14: mol_type = other RNA
ttggctcctgaact

SEQ ID NO: 2683 - RNA, 14 nt, synthetic construct
  misc_feature 1..14: note = Antisense oligonucleotide
  source 1..14: mol_type = other RNA
cctgtccacccatc

SEQ ID NO: 2684 - RNA, 14 nt, synthetic construct
  misc_feature 1..14: note = Antisense oligonucleotide
  source 1..14: mol_type = other RNA
tgcaacgatccgta

SEQ ID NO: 2685 - RNA, 14 nt, synthetic construct
  misc_feature 1..14: note = Antisense oligonucleotide
  source 1..14: mol_type = other RNA
ttggctcctgaact

SEQ ID NO: 2686 - RNA, 14 nt, synthetic construct
  misc_feature 1..14: note = Antisense oligonucleotide
  source 1..14: mol_type = other RNA
cctgtccacccatc

SEQ ID NO: 2687 - RNA, 14 nt, synthetic construct
  misc_feature 1..14: note = Antisense oligonucleotide
  source 1..14: mol_type = other RNA
ccgacgagcagcga

SEQ ID NO: 2688 - RNA, 14 nt, synthetic construct
  misc_feature 1..14: note = Antisense oligonucleotide
  source 1..14: mol_type = other RNA
tgcaacgatccgta

SEQ ID NO: 2689 - RNA, 14 nt, synthetic construct
  misc_feature 1..14: note = Antisense oligonucleotide
  source 1..14: mol_type = other RNA
ttggctcctgaact

SEQ ID NO: 2690 - RNA, 14 nt, synthetic construct
  misc_feature 1..14: note = Antisense oligonucleotide
  source 1..14: mol_type = other RNA
cctgtccacccatc

SEQ ID NO: 2691 - RNA, 14 nt, synthetic construct
  misc_feature 1..14: note = Antisense oligonucleotide
  source 1..14: mol_type = other RNA
ccgacgagcagcga

SEQ ID NO: 2692 - RNA, 14 nt, synthetic construct
  misc_feature 1..14: note = Antisense oligonucleotide
  source 1..14: mol_type = other RNA
tgcaacgatccgta

SEQ ID NO: 2693 - RNA, 14 nt, synthetic construct
  misc_feature 1..14: note = Antisense oligonucleotide
  source 1..14: mol_type = other RNA
ttggctcctgaact

SEQ ID NO: 2694 - RNA, 14 nt, synthetic construct
  misc_feature 1..14: note = Antisense oligonucleotide
  source 1..14: mol_type = other RNA
cctgtccacccatc

SEQ ID NO: 2695 - RNA, 14 nt, synthetic construct
  misc_feature 1..14: note = Antisense oligonucleotide
  source 1..14: mol_type = other RNA
ccgacgagcagcga

SEQ ID NO: 2696 - RNA, 14 nt, synthetic construct
  misc_feature 1..14: note = Antisense oligonucleotide
  source 1..14: mol_type = other RNA
tgcaacgatccgta

SEQ ID NO: 2697 - RNA, 14 nt, synthetic construct
  misc_feature 1..14: note = Antisense oligonucleotide
  source 1..14: mol_type = other RNA
ttggctcctgaact

SEQ ID NO: 2698 - RNA, 14 nt, synthetic construct
  misc_feature 1..14: note = Antisense oligonucleotide
  source 1..14: mol_type = other RNA
cctgtccacccatc

SEQ ID NO: 2699 - RNA, 14 nt, synthetic construct
  misc_feature 1..14: note = Antisense oligonucleotide
  source 1..14: mol_type = other RNA
tgcaacgatccgta

SEQ ID NO: 2700 - RNA, 14 nt, synthetic construct
  misc_feature 1..14: note = Antisense oligonucleotide
  source 1..14: mol_type = other RNA
ttggctcctgaact

SEQ ID NO: 2701 - RNA, 14 nt, synthetic construct
  misc_feature 1..14: note = Antisense oligonucleotide
  source 1..14: mol_type = other RNA
cctgtccacccatc

SEQ ID NO: 2702 - RNA, 14 nt, synthetic construct
  misc_feature 1..14: note = Antisense oligonucleotide
  source 1..14: mol_type = other RNA
ccgacgagcagcga

SEQ ID NO: 2703 - RNA, 14 nt, synthetic construct
  misc_feature 1..14: note = Antisense oligonucleotide
  source 1..14: mol_type = other RNA
tgcaacgatccgta

SEQ ID NO: 2704 - RNA, 14 nt, synthetic construct
  misc_feature 1..14: note = Antisense oligonucleotide
  source 1..14: mol_type = other RNA
ttggctcctgaact

SEQ ID NO: 2705 - RNA, 14 nt, synthetic construct
  misc_feature 1..14: note = Antisense oligonucleotide
  source 1..14: mol_type = other RNA
cctgtccacccatc

SEQ ID NO: 2706 - RNA, 14 nt, synthetic construct
  misc_feature 1..14: note = Antisense oligonucleotide
  source 1..14: mol_type = other RNA
cccctgtgctcact

SEQ ID NO: 2707 - RNA, 14 nt, synthetic construct
  misc_feature 1..14: note = Antisense oligonucleotide
  source 1..14: mol_type = other RNA
ccgacgagcagcga

SEQ ID NO: 2708 - RNA, 14 nt, synthetic construct
  misc_feature 1..14: note = Antisense oligonucleotide
  source 1..14: mol_type = other RNA
tgcaacgatccgta

SEQ ID NO: 2709 - RNA, 14 nt, synthetic construct
  misc_feature 1..14: note = Antisense oligonucleotide
  source 1..14: mol_type = other RNA
ttggctcctgaact

SEQ ID NO: 2710 - RNA, 14 nt, synthetic construct
  misc_feature 1..14: note = Antisense oligonucleotide
  source 1..14: mol_type = other RNA
cctgtccacccatc

SEQ ID NO: 2711 - RNA, 14 nt, synthetic construct
  misc_feature 1..14: note = Antisense oligonucleotide
  source 1..14: mol_type = other RNA
ccgacgagcagcga

SEQ ID NO: 2712 - RNA, 14 nt, synthetic construct
  misc_feature 1..14: note = Antisense oligonucleotide
  source 1..14: mol_type = other RNA
tgcaacgatccgta

SEQ ID NO: 2713 - RNA, 14 nt, synthetic construct
  misc_feature 1..14: note = Antisense oligonucleotide
  source 1..14: mol_type = other RNA
ttggctcctgaact

SEQ ID NO: 2714 - RNA, 14 nt, synthetic construct
  misc_feature 1..14: note = Antisense oligonucleotide
  source 1..14: mol_type = other RNA
cctgtccacccatc

SEQ ID NO: 2715 - RNA, 14 nt, synthetic construct
  misc_feature 1..14: note = Antisense oligonucleotide
  source 1..14: mol_type = other RNA
tgcaacgatccgta

SEQ ID NO: 2716 - RNA, 14 nt, synthetic construct
  misc_feature 1..14: note = Antisense oligonucleotide
  source 1..14: mol_type = other RNA
ttggctcctgaact

SEQ ID NO: 2717 - RNA, 14 nt, synthetic construct
  misc_feature 1..14: note = Antisense oligonucleotide
  source 1..14: mol_type = other RNA
cctgtccacccatc

SEQ ID NO: 2718 - RNA, 14 nt, synthetic construct
  misc_feature 1..14: note = Antisense oligonucleotide
  source 1..14: mol_type = other RNA
ccgacgagcagcga

SEQ ID NO: 2719 - RNA, 14 nt, synthetic construct
  misc_feature 1..14: note = Antisense oligonucleotide
  source 1..14: mol_type = other RNA
tgcaacgatccgta

SEQ ID NO: 2720 - RNA, 14 nt, synthetic construct
  misc_feature 1..14: note = Antisense oligonucleotide
  source 1..14: mol_type = other RNA
ttggctcctgaact

SEQ ID NO: 2721 - RNA, 14 nt, synthetic construct
  misc_feature 1..14: note = Antisense oligonucleotide
  source 1..14: mol_type = other RNA
cctgtccacccatc

SEQ ID NO: 2722 - RNA, 14 nt, synthetic construct
  misc_feature 1..14: note = Antisense oligonucleotide
  source 1..14: mol_type = other RNA
ccgacgagcagcga

SEQ ID NO: 2723 - RNA, 14 nt, synthetic construct
  misc_feature 1..14: note = Antisense oligonucleotide
  source 1..14: mol_type = other RNA
tgcaacgatccgta

SEQ ID NO: 2724 - RNA, 14 nt, synthetic construct
  misc_feature 1..14: note = Antisense oligonucleotide
  source 1..14: mol_type = other RNA
ttggctcctgaact

SEQ ID NO: 2725 - RNA, 14 nt, synthetic construct
  misc_feature 1..14: note = Antisense oligonucleotide
  source 1..14: mol_type = other RNA
cctgtccacccatc

SEQ ID NO: 2726 - RNA, 14 nt, synthetic construct
  misc_feature 1..14: note = Antisense oligonucleotide
  source 1..14: mol_type = other RNA
ccgacgagcagcga

SEQ ID NO: 2727 - RNA, 14 nt, synthetic construct
  misc_feature 1..14: note = Antisense oligonucleotide
  source 1..14: mol_type = other RNA
tgcaacgatccgta

SEQ ID NO: 2728 - RNA, 14 nt, synthetic construct
  misc_feature 1..14: note = Antisense oligonucleotide
  source 1..14: mol_type = other RNA
ttggctcctgaact

SEQ ID NO: 2729 - RNA, 14 nt, synthetic construct
  misc_feature 1..14: note = Antisense oligonucleotide
  source 1..14: mol_type = other RNA
cctgtccacccatc

SEQ ID NO: 2730 - RNA, 14 nt, synthetic construct
  misc_feature 1..14: note = Antisense oligonucleotide
  source 1..14: mol_type = other RNA
tgcaacgatccgta

SEQ ID NO: 2731 - RNA, 14 nt, synthetic construct
  misc_feature 1..14: note = Antisense oligonucleotide
  source 1..14: mol_type = other RNA
ttggctcctgaact

SEQ ID NO: 2732 - RNA, 14 nt, synthetic construct
  misc_feature 1..14: note = Antisense oligonucleotide
  source 1..14: mol_type = other RNA
cctgtccacccatc

SEQ ID NO: 2733 - RNA, 14 nt, synthetic construct
  misc_feature 1..14: note = Antisense oligonucleotide
  source 1..14: mol_type = other RNA
ccgacgagcagcga

SEQ ID NO: 2734 - RNA, 14 nt, synthetic construct
  misc_feature 1..14: note = Antisense oligonucleotide
  source 1..14: mol_type = other RNA
tgcaacgatccgta

SEQ ID NO: 2735 - RNA, 14 nt, synthetic construct
  misc_feature 1..14: note = Antisense oligonucleotide
  source 1..14: mol_type = other RNA
ccgacgagcagcga

SEQ ID NO: 2736 - RNA, 14 nt, synthetic construct
  misc_feature 1..14: note = Antisense oligonucleotide
  source 1..14: mol_type = other RNA
tgcaacgatccgta

SEQ ID NO: 2737 - RNA, 14 nt, synthetic construct
  misc_feature 1..14: note = Antisense oligonucleotide
  source 1..14: mol_type = other RNA
ttggctcctgaact

SEQ ID NO: 2738 - RNA, 14 nt, synthetic construct
  misc_feature 1..14: note = Antisense oligonucleotide
  source 1..14: mol_type = other RNA
cctgtccacccatc

SEQ ID NO: 2739 - RNA, 14 nt, synthetic construct
  misc_feature 1..14: note = Antisense oligonucleotide
  source 1..14: mol_type = other RNA
ccgacgagcagcga

SEQ ID NO: 2740 - RNA, 14 nt, synthetic construct
  misc_feature 1..14: note = Antisense oligonucleotide
  source 1..14: mol_type = other RNA
tgcaacgatccgta

SEQ ID NO: 2741 - RNA, 14 nt, synthetic construct
  misc_feature 1..14: note = Antisense oligonucleotide
  source 1..14: mol_type = other RNA
ttggctcctgaact

SEQ ID NO: 2742 - RNA, 14 nt, synthetic construct
  misc_feature 1..14: note = Antisense oligonucleotide
  source 1..14: mol_type = other RNA
cctgtccacccatc

SEQ ID NO: 2743 - RNA, 14 nt, synthetic construct
  misc_feature 1..14: note = Antisense oligonucleotide
  source 1..14: mol_type = other RNA
tgcaacgatccgta

SEQ ID NO: 2744 - RNA, 14 nt, synthetic construct
  misc_feature 1..14: note = Antisense oligonucleotide
  source 1..14: mol_type = other RNA
ttggctcctgaact

SEQ ID NO: 2745 - RNA, 14 nt, synthetic construct
  misc_feature 1..14: note = Antisense oligonucleotide
  source 1..14: mol_type = other RNA
cctgtccacccatc

SEQ ID NO: 2746 - RNA, 14 nt, synthetic construct
  misc_feature 1..14: note = Antisense oligonucleotide
  source 1..14: mol_type = other RNA
ccgacgagcagcga

SEQ ID NO: 2747 - RNA, 14 nt, synthetic construct
  misc_feature 1..14: note = Antisense oligonucleotide
  source 1..14: mol_type = other RNA
tgcaacgatccgta

SEQ ID NO: 2748 - RNA, 14 nt, synthetic construct
  misc_feature 1..14: note = Antisense oligonucleotide
  source 1..14: mol_type = other RNA
ttggctcctgaact

SEQ ID NO: 2749 - RNA, 14 nt, synthetic construct
  misc_feature 1..14: note = Antisense oligonucleotide
  source 1..14: mol_type = other RNA
cctgtccacccatc

SEQ ID NO: 2750 - RNA, 14 nt, synthetic construct
  misc_feature 1..14: note = Antisense oligonucleotide
  source 1..14: mol_type = other RNA
ccgacgagcagcga

SEQ ID NO: 2751 - RNA, 14 nt, synthetic construct
  misc_feature 1..14: note = Antisense oligonucleotide
  source 1..14: mol_type = other RNA
tgcaacgatccgta

SEQ ID NO: 2752 - RNA, 14 nt, synthetic construct
  misc_feature 1..14: note = Antisense oligonucleotide
  source 1..14: mol_type = other RNA
ttggctcctgaact

SEQ ID NO: 2753 - RNA, 14 nt, synthetic construct
  misc_feature 1..14: note = Antisense oligonucleotide
  source 1..14: mol_type = other RNA
cctgtccacccatc

SEQ ID NO: 2754 - RNA, 14 nt, synthetic construct
  misc_feature 1..14: note = Antisense oligonucleotide
  source 1..14: mol_type = other RNA
ccgacgagcagcga

SEQ ID NO: 2755 - RNA, 14 nt, synthetic construct
  misc_feature 1..14: note = Antisense oligonucleotide
  source 1..14: mol_type = other RNA
tgcaacgatccgta

SEQ ID NO: 2756 - RNA, 14 nt, synthetic construct
  misc_feature 1..14: note = Antisense oligonucleotide
  source 1..14: mol_type = other RNA
ttggctcctgaact

SEQ ID NO: 2757 - RNA, 14 nt, synthetic construct
  misc_feature 1..14: note = Antisense oligonucleotide
  source 1..14: mol_type = other RNA
cctgtccacccatc

SEQ ID NO: 2758 - RNA, 14 nt, synthetic construct
  misc_feature 1..14: note = Antisense oligonucleotide
  source 1..14: mol_type = other RNA
tgcaacgatccgta

SEQ ID NO: 2759 - RNA, 14 nt, synthetic construct
  misc_feature 1..14: note = Antisense oligonucleotide
  source 1..14: mol_type = other RNA
ttggctcctgaact

SEQ ID NO: 2760 - RNA, 14 nt, synthetic construct
  misc_feature 1..14: note = Antisense oligonucleotide
  source 1..14: mol_type = other RNA
cctgtccacccatc

SEQ ID NO: 2761 - RNA, 14 nt, synthetic construct
  misc_feature 1..14: note = Antisense oligonucleotide
  source 1..14: mol_type = other RNA
ccgacgagcagcga

SEQ ID NO: 2762 - RNA, 14 nt, synthetic construct
  misc_feature 1..14: note = Antisense oligonucleotide
  source 1..14: mol_type = other RNA
tgcaacgatccgta

SEQ ID NO: 2763 - RNA, 14 nt, synthetic construct
  misc_feature 1..14: note = Antisense oligonucleotide
  source 1..14: mol_type = other RNA
ccgacgagcagcga

SEQ ID NO: 2764 - RNA, 14 nt, synthetic construct
  misc_feature 1..14: note = Antisense oligonucleotide
  source 1..14: mol_type = other RNA
tgcaacgatccgta

SEQ ID NO: 2765 - RNA, 14 nt, synthetic construct
  misc_feature 1..14: note = Antisense oligonucleotide
  source 1..14: mol_type = other RNA
ttggctcctgaact

SEQ ID NO: 2766 - RNA, 14 nt, synthetic construct
  misc_feature 1..14: note = Antisense oligonucleotide
  source 1..14: mol_type = other RNA
cctgtccacccatc

SEQ ID NO: 2767 - RNA, 14 nt, synthetic construct
  misc_feature 1..14: note = Antisense oligonucleotide
  source 1..14: mol_type = other RNA
ccgacgagcagcga

SEQ ID NO: 2768 - RNA, 14 nt, synthetic construct
  misc_feature 1..14: note = Antisense oligonucleotide
  source 1..14: mol_type = other RNA
tgcaacgatccgta

SEQ ID NO: 2769 - RNA, 14 nt, synthetic construct
  misc_feature 1..14: note = Antisense oligonucleotide
  source 1..14: mol_type = other RNA
ttggctcctgaact

SEQ ID NO: 2770 - RNA, 14 nt, synthetic construct
  misc_feature 1..14: note = Antisense oligonucleotide
  source 1..14: mol_type = other RNA
cctgtccacccatc

SEQ ID NO: 2771 - RNA, 14 nt, synthetic construct
  misc_feature 1..14: note = Antisense oligonucleotide
  source 1..14: mol_type = other RNA
tgcaacgatccgta

SEQ ID NO: 2772 - RNA, 14 nt, synthetic construct
  misc_feature 1..14: note = Antisense oligonucleotide
  source 1..14: mol_type = other RNA
ttggctcctgaact

SEQ ID NO: 2773 - RNA, 14 nt, synthetic construct
  misc_feature 1..14: note = Antisense oligonucleotide
  source 1..14: mol_type = other RNA
cctgtccacccatc

SEQ ID NO: 2774 - RNA, 14 nt, synthetic construct
  misc_feature 1..14: note = Antisense oligonucleotide
  source 1..14: mol_type = other RNA
ccgacgagcagcga

SEQ ID NO: 2775 - RNA, 14 nt, synthetic construct
  misc_feature 1..14: note = Antisense oligonucleotide
  source 1..14: mol_type = other RNA
tgcaacgatccgta

SEQ ID NO: 2776 - RNA, 14 nt, synthetic construct
  misc_feature 1..14: note = Antisense oligonucleotide
  source 1..14: mol_type = other RNA
ttggctcctgaact

SEQ ID NO: 2777 - RNA, 14 nt, synthetic construct
  misc_feature 1..14: note = Antisense oligonucleotide
  source 1..14: mol_type = other RNA
cctgtccacccatc

SEQ ID NO: 2778 - RNA, 14 nt, synthetic construct
  misc_feature 1..14: note = Antisense oligonucleotide
  source 1..14: mol_type = other RNA
ccgacgagcagcga

SEQ ID NO: 2779 - RNA, 14 nt, synthetic construct
  misc_feature 1..14: note = Antisense oligonucleotide
  source 1..14: mol_type = other RNA
tgcaacgatccgta

SEQ ID NO: 2780 - RNA, 14 nt, synthetic construct
  misc_feature 1..14: note = Antisense oligonucleotide
  source 1..14: mol_type = other RNA
ttggctcctgaact

SEQ ID NO: 2781 - RNA, 14 nt, synthetic construct
  misc_feature 1..14: note = Antisense oligonucleotide
  source 1..14: mol_type = other RNA
cctgtccacccatc

SEQ ID NO: 2782 - RNA, 14 nt, synthetic construct
  misc_feature 1..14: note = Antisense oligonucleotide
  source 1..14: mol_type = other RNA
ccgacgagcagcga

SEQ ID NO: 2783 - RNA, 14 nt, synthetic construct
  misc_feature 1..14: note = Antisense oligonucleotide
  source 1..14: mol_type = other RNA
tgcaacgatccgta

SEQ ID NO: 2784 - RNA, 14 nt, synthetic construct
  misc_feature 1..14: note = Antisense oligonucleotide
  source 1..14: mol_type = other RNA
ttggctcctgaact

SEQ ID NO: 2785 - RNA, 14 nt, synthetic construct
  misc_feature 1..14: note = Antisense oligonucleotide
  source 1..14: mol_type = other RNA
cctgtccacccatc

SEQ ID NO: 2786 - RNA, 14 nt, synthetic construct
  misc_feature 1..14: note = Antisense oligonucleotide
  source 1..14: mol_type = other RNA
tgcaacgatccgta

SEQ ID NO: 2787 - RNA, 14 nt, synthetic construct
  misc_feature 1..14: note = Antisense oligonucleotide
  source 1..14: mol_type = other RNA
ttggctcctgaact

SEQ ID NO: 2788 - RNA, 14 nt, synthetic construct
  misc_feature 1..14: note = Antisense oligonucleotide
  source 1..14: mol_type = other RNA
cctgtccacccatc

SEQ ID NO: 2789 - RNA, 14 nt, synthetic construct
  misc_feature 1..14: note = Antisense oligonucleotide
  source 1..14: mol_type = other RNA
ccgacgagcagcga

SEQ ID NO: 2790 - RNA, 14 nt, synthetic construct
  misc_feature 1..14: note = Antisense oligonucleotide
  source 1..14: mol_type = other RNA
tgcaacgatccgta

SEQ ID NO: 2791 - RNA, 14 nt, synthetic construct
  misc_feature 1..14: note = Antisense oligonucleotide
  source 1..14: mol_type = other RNA
ccgacgagcagcga

SEQ ID NO: 2792 - RNA, 14 nt, synthetic construct
  misc_feature 1..14: note = Antisense oligonucleotide
  source 1..14: mol_type = other RNA
tgcaacgatccgta

SEQ ID NO: 2793 - RNA, 14 nt, synthetic construct
  misc_feature 1..14: note = Antisense oligonucleotide
  source 1..14: mol_type = other RNA
ttggctcctgaact

SEQ ID NO: 2794 - RNA, 14 nt, synthetic construct
  misc_feature 1..14: note = Antisense oligonucleotide
  source 1..14: mol_type = other RNA
cctgtccacccatc

SEQ ID NO: 2795 - RNA, 14 nt, synthetic construct
  misc_feature 1..14: note = Antisense oligonucleotide
  source 1..14: mol_type = other RNA
ccgacgagcagcga

SEQ ID NO: 2796 - RNA, 14 nt, synthetic construct
  misc_feature 1..14: note = Antisense oligonucleotide
  source 1..14: mol_type = other RNA
tgcaacgatccgta

SEQ ID NO: 2797 - RNA, 14 nt, synthetic construct
  misc_feature 1..14: note = Antisense oligonucleotide
  source 1..14: mol_type = other RNA
ttggctcctgaact

SEQ ID NO: 2798 - RNA, 14 nt, synthetic construct
  misc_feature 1..14: note = Antisense oligonucleotide
  source 1..14: mol_type = other RNA
cctgtccacccatc

SEQ ID NO: 2799 - RNA, 14 nt, synthetic construct
  misc_feature 1..14: note = Antisense oligonucleotide
  source 1..14: mol_type = other RNA
tgcaacgatccgta

SEQ ID NO: 2800 - RNA, 14 nt, synthetic construct
  misc_feature 1..14: note = Antisense oligonucleotide
  source 1..14: mol_type = other RNA
ttggctcctgaact

SEQ ID NO: 2801 - RNA, 14 nt, synthetic construct
  misc_feature 1..14: note = Antisense oligonucleotide
  source 1..14: mol_type = other RNA
cctgtccacccatc

SEQ ID NO: 2802 - RNA, 14 nt, synthetic construct
  misc_feature 1..14: note = Antisense oligonucleotide
  source 1..14: mol_type = other RNA
ccgacgagcagcga

SEQ ID NO: 2803 - RNA, 14 nt, synthetic construct
  misc_feature 1..14: note = Antisense oligonucleotide
  source 1..14: mol_type = other RNA
tgcaacgatccgta

SEQ ID NO: 2804 - RNA, 14 nt, synthetic construct
  misc_feature 1..14: note = Antisense oligonucleotide
  source 1..14: mol_type = other RNA
ttggctcctgaact

SEQ ID NO: 2805 - RNA, 14 nt, synthetic construct
  misc_feature 1..14: note = Antisense oligonucleotide
  source 1..14: mol_type = other RNA
cctgtccacccatc

SEQ ID NO: 2806 - RNA, 14 nt, synthetic construct
  misc_feature 1..14: note = Antisense oligonucleotide
  source 1..14: mol_type = other RNA
ccgacgagcagcga

SEQ ID NO: 2807 - RNA, 14 nt, synthetic construct
  misc_feature 1..14: note = Antisense oligonucleotide
  source 1..14: mol_type = other RNA
tgcaacgatccgta

SEQ ID NO: 2808 - RNA, 14 nt, synthetic construct
  misc_feature 1..14: note = Antisense oligonucleotide
  source 1..14: mol_type = other RNA
ttggctcctgaact

SEQ ID NO: 2809 - RNA, 14 nt, synthetic construct
  misc_feature 1..14: note = Antisense oligonucleotide
  source 1..14: mol_type = other RNA
cctgtccacccatc

SEQ ID NO: 2810 - RNA, 14 nt, synthetic construct
  misc_feature 1..14: note = Antisense oligonucleotide
  source 1..14: mol_type = other RNA
ccgacgagcagcga

SEQ ID NO: 2811 - RNA, 14 nt, synthetic construct
  misc_feature 1..14: note = Antisense oligonucleotide
  source 1..14: mol_type = other RNA
tgcaacgatccgta

SEQ ID NO: 2812 - RNA, 14 nt, synthetic construct
  misc_feature 1..14: note = Antisense oligonucleotide
  source 1..14: mol_type = other RNA
ttggctcctgaact

SEQ ID NO: 2813 - RNA, 14 nt, synthetic construct
  misc_feature 1..14: note = Antisense oligonucleotide
  source 1..14: mol_type = other RNA
cctgtccacccatc

SEQ ID NO: 2814 - RNA, 14 nt, synthetic construct
  misc_feature 1..14: note = Antisense oligonucleotide
  source 1..14: mol_type = other RNA
tgcaacgatccgta

SEQ ID NO: 2815 - RNA, 14 nt, synthetic construct
  misc_feature 1..14: note = Antisense oligonucleotide
  source 1..14: mol_type = other RNA
ccgacgagcagcga

SEQ ID NO: 2816 - RNA, 14 nt, synthetic construct
  misc_feature 1..14: note = Antisense oligonucleotide
  source 1..14: mol_type = other RNA
tgcaacgatccgta

SEQ ID NO: 2817 - RNA, 14 nt, synthetic construct
  misc_feature 1..14: note = Antisense oligonucleotide
  source 1..14: mol_type = other RNA
ttggctcctgaact

SEQ ID NO: 2818 - RNA, 14 nt, synthetic construct
  misc_feature 1..14: note = Antisense oligonucleotide
  source 1..14: mol_type = other RNA
cctgtccacccatc

SEQ ID NO: 2819 - RNA, 14 nt, synthetic construct
  misc_feature 1..14: note = Antisense oligonucleotide
  source 1..14: mol_type = other RNA
ccgacgagcagcga

SEQ ID NO: 2820 - RNA, 14 nt, synthetic construct
  misc_feature 1..14: note = Antisense oligonucleotide
  source 1..14: mol_type = other RNA
tgcaacgatccgta

SEQ ID NO: 2821 - RNA, 14 nt, synthetic construct
  misc_feature 1..14: note = Antisense oligonucleotide
  source 1..14: mol_type = other RNA
ttggctcctgaact

SEQ ID NO: 2822 - RNA, 14 nt, synthetic construct
  misc_feature 1..14: note = Antisense oligonucleotide
  source 1..14: mol_type = other RNA
cctgtccacccatc

SEQ ID NO: 2823 - RNA, 14 nt, synthetic construct
  misc_feature 1..14: note = Antisense oligonucleotide
  source 1..14: mol_type = other RNA
tgcaacgatccgta

SEQ ID NO: 2824 - RNA, 14 nt, synthetic construct
  misc_feature 1..14: note = Antisense oligonucleotide
  source 1..14: mol_type = other RNA
ttggctcctgaact

SEQ ID NO: 2825 - RNA, 14 nt, synthetic construct
  misc_feature 1..14: note = Antisense oligonucleotide
  source 1..14: mol_type = other RNA
cctgtccacccatc

SEQ ID NO: 2826 - RNA, 14 nt, synthetic construct
  misc_feature 1..14: note = Antisense oligonucleotide
  source 1..14: mol_type = other RNA
ccgacgagcagcga

SEQ ID NO: 2827 - RNA, 14 nt, synthetic construct
  misc_feature 1..14: note = Antisense oligonucleotide
  source 1..14: mol_type = other RNA
tgcaacgatccgta

SEQ ID NO: 2828 - RNA, 14 nt, synthetic construct
  misc_feature 1..14: note = Antisense oligonucleotide
  source 1..14: mol_type = other RNA
ttggctcctgaact

SEQ ID NO: 2829 - RNA, 14 nt, synthetic construct
  misc_feature 1..14: note = Antisense oligonucleotide
  source 1..14: mol_type = other RNA
cctgtccacccatc

SEQ ID NO: 2830 - RNA, 14 nt, synthetic construct
  misc_feature 1..14: note = Antisense oligonucleotide
  source 1..14: mol_type = other RNA
ccgacgagcagcga

SEQ ID NO: 2831 - RNA, 14 nt, synthetic construct
  misc_feature 1..14: note = Antisense oligonucleotide
  source 1..14: mol_type = other RNA
tgcaacgatccgta

SEQ ID NO: 2832 - RNA, 14 nt, synthetic construct
  misc_feature 1..14: note = Antisense oligonucleotide
  source 1..14: mol_type = other RNA
ttggctcctgaact

SEQ ID NO: 2833 - RNA, 14 nt, synthetic construct
  misc_feature 1..14: note = Antisense oligonucleotide
  source 1..14: mol_type = other RNA
cctgtccacccatc

SEQ ID NO: 2834 - RNA, 14 nt, synthetic construct
  misc_feature 1..14: note = Antisense oligonucleotide
  source 1..14: mol_type = other RNA
ccgacgagcagcga

SEQ ID NO: 2835 - RNA, 14 nt, synthetic construct
  misc_feature 1..14: note = Antisense oligonucleotide
  source 1..14: mol_type = other RNA
tgcaacgatccgta

SEQ ID NO: 2836 - RNA, 14 nt, synthetic construct
  misc_feature 1..14: note = Antisense oligonucleotide
  source 1..14: mol_type = other RNA
ttggctcctgaact

SEQ ID NO: 2837 - RNA, 14 nt, synthetic construct
  misc_feature 1..14: note = Antisense oligonucleotide
  source 1..14: mol_type = other RNA
cctgtccacccatc

SEQ ID NO: 2838 - RNA, 14 nt, synthetic construct
  misc_feature 1..14: note = Antisense oligonucleotide
  source 1..14: mol_type = other RNA
tgcaacgatccgta

SEQ ID NO: 2839 - RNA, 14 nt, synthetic construct
  misc_feature 1..14: note = Antisense oligonucleotide
  source 1..14: mol_type = other RNA
ttggctcctgaact

SEQ ID NO: 2840 - RNA, 14 nt, synthetic construct
  misc_feature 1..14: note = Antisense oligonucleotide
  source 1..14: mol_type = other RNA
cctgtccacccatc

SEQ ID NO: 2841 - RNA, 14 nt, synthetic construct
  misc_feature 1..14: note = Antisense oligonucleotide
  source 1..14: mol_type = other RNA
ccgacgagcagcga

SEQ ID NO: 2842 - RNA, 14 nt, synthetic construct
  misc_feature 1..14: note = Antisense oligonucleotide
  source 1..14: mol_type = other RNA
tgcaacgatccgta

SEQ ID NO: 2843 - RNA, 14 nt, synthetic construct
  misc_feature 1..14: note = Antisense oligonucleotide
  source 1..14: mol_type = other RNA
ccgacgagcagcga

SEQ ID NO: 2844 - RNA, 14 nt, synthetic construct
  misc_feature 1..14: note = Antisense oligonucleotide
  source 1..14: mol_type = other RNA
tgcaacgatccgta

SEQ ID NO: 2845 - RNA, 14 nt, synthetic construct
  misc_feature 1..14: note = Antisense oligonucleotide
  source 1..14: mol_type = other RNA
ttggctcctgaact

SEQ ID NO: 2846 - RNA, 14 nt, synthetic construct
  misc_feature 1..14: note = Antisense oligonucleotide
  source 1..14: mol_type = other RNA
cctgtccacccatc

SEQ ID NO: 2847 - RNA, 14 nt, synthetic construct
  misc_feature 1..14: note = Antisense oligonucleotide
  source 1..14: mol_type = other RNA
ccgacgagcagcga

SEQ ID NO: 2848 - RNA, 14 nt, synthetic construct
  misc_feature 1..14: note = Antisense oligonucleotide
  source 1..14: mol_type = other RNA
tgcaacgatccgta

SEQ ID NO: 2849 - RNA, 14 nt, synthetic construct
  misc_feature 1..14: note = Antisense oligonucleotide
  source 1..14: mol_type = other RNA
ttggctcctgaact

SEQ ID NO: 2850 - RNA, 14 nt, synthetic construct
  misc_feature 1..14: note = Antisense oligonucleotide
  source 1..14: mol_type = other RNA
cctgtccacccatc

SEQ ID NO: 2851 - RNA, 14 nt, synthetic construct
  misc_feature 1..14: note = Antisense oligonucleotide
  source 1..14: mol_type = other RNA
tgcaacgatccgta

SEQ ID NO: 2852 - RNA, 14 nt, synthetic construct
  misc_feature 1..14: note = Antisense oligonucleotide
  source 1..14: mol_type = other RNA
ttggctcctgaact

SEQ ID NO: 2853 - RNA, 14 nt, synthetic construct
  misc_feature 1..14: note = Antisense oligonucleotide
  source 1..14: mol_type = other RNA
cctgtccacccatc

SEQ ID NO: 2854 - RNA, 14 nt, synthetic construct
  misc_feature 1..14: note = Antisense oligonucleotide
  source 1..14: mol_type = other RNA
ccgacgagcagcga

SEQ ID NO: 2855 - RNA, 14 nt, synthetic construct
  misc_feature 1..14: note = Antisense oligonucleotide
  source 1..14: mol_type = other RNA
tgcaacgatccgta

SEQ ID NO: 2856 - RNA, 14 nt, synthetic construct
  misc_feature 1..14: note = Antisense oligonucleotide
  source 1..14: mol_type = other RNA
ttggctcctgaact

SEQ ID NO: 2857 - RNA, 14 nt, synthetic construct
  misc_feature 1..14: note = Antisense oligonucleotide
  source 1..14: mol_type = other RNA
cctgtccacccatc

SEQ ID NO: 2858 - RNA, 14 nt, synthetic construct
  misc_feature 1..14: note = Antisense oligonucleotide
  source 1..14: mol_type = other RNA
ccgacgagcagcga

SEQ ID NO: 2859 - RNA, 14 nt, synthetic construct
  misc_feature 1..14: note = Antisense oligonucleotide
  source 1..14: mol_type = other RNA
tgcaacgatccgta

SEQ ID NO: 2860 - RNA, 14 nt, synthetic construct
  misc_feature 1..14: note = Antisense oligonucleotide
  source 1..14: mol_type = other RNA
ttggctcctgaact

SEQ ID NO: 2861 - RNA, 14 nt, synthetic construct
  misc_feature 1..14: note = Antisense oligonucleotide
  source 1..14: mol_type = other RNA
cctgtccacccatc

SEQ ID NO: 2862 - RNA, 14 nt, synthetic construct
  misc_feature 1..14: note = Antisense oligonucleotide
  source 1..14: mol_type = other RNA
ccgacgagcagcga

SEQ ID NO: 2863 - RNA, 14 nt, synthetic construct
  misc_feature 1..14: note = Antisense oligonucleotide
  source 1..14: mol_type = other RNA
tgcaacgatccgta

SEQ ID NO: 2864 - RNA, 14 nt, synthetic construct
  misc_feature 1..14: note = Antisense oligonucleotide
  source 1..14: mol_type = other RNA
ttggctcctgaact

SEQ ID NO: 2865 - RNA, 14 nt, synthetic construct
  misc_feature 1..14: note = Antisense oligonucleotide
  source 1..14: mol_type = other RNA
cctgtccacccatc

SEQ ID NO: 2866 - RNA, 14 nt, synthetic construct
  misc_feature 1..14: note = Antisense oligonucleotide
  source 1..14: mol_type = other RNA
tgcaacgatccgta

SEQ ID NO: 2867 - RNA, 14 nt, synthetic construct
  misc_feature 1..14: note = Antisense oligonucleotide
  source 1..14: mol_type = other RNA
ttggctcctgaact

SEQ ID NO: 2868 - RNA, 14 nt, synthetic construct
  misc_feature 1..14: note = Antisense oligonucleotide
  source 1..14: mol_type = other RNA
cctgtccacccatc

SEQ ID NO: 2869 - RNA, 14 nt, synthetic construct
  misc_feature 1..14: note = Antisense oligonucleotide
  source 1..14: mol_type = other RNA
ccgacgagcagcga

SEQ ID NO: 2870 - RNA, 14 nt, synthetic construct
  misc_feature 1..14: note = Antisense oligonucleotide
  source 1..14: mol_type = other RNA
tgcaacgatccgta

SEQ ID NO: 2871 - RNA, 14 nt, synthetic construct
  misc_feature 1..14: note = Antisense oligonucleotide
  source 1..14: mol_type = other RNA
ttggctcctgaact

SEQ ID NO: 2872 - RNA, 14 nt, synthetic construct
  misc_feature 1..14: note = Antisense oligonucleotide
  source 1..14: mol_type = other RNA
cctgtccacccatc

SEQ ID NO: 2873 - RNA, 14 nt, synthetic construct
  misc_feature 1..14: note = Antisense oligonucleotide
  source 1..14: mol_type = other RNA
cccctgtgctcact

SEQ ID NO: 2874 - RNA, 14 nt, synthetic construct
  misc_feature 1..14: note = Antisense oligonucleotide
  source 1..14: mol_type = other RNA
ccgacgagcagcga

SEQ ID NO: 2875 - RNA, 14 nt, synthetic construct
  misc_feature 1..14: note = Antisense oligonucleotide
  source 1..14: mol_type = other RNA
tgcaacgatccgta

SEQ ID NO: 2876 - RNA, 14 nt, synthetic construct
  misc_feature 1..14: note = Antisense oligonucleotide
  source 1..14: mol_type = other RNA
ttggctcctgaact

SEQ ID NO: 2877 - RNA, 14 nt, synthetic construct
  misc_feature 1..14: note = Antisense oligonucleotide
  source 1..14: mol_type = other RNA
cctgtccacccatc

SEQ ID NO: 2878 - RNA, 14 nt, synthetic construct
  misc_feature 1..14: note = Antisense oligonucleotide
  source 1..14: mol_type = other RNA
ccgacgagcagcga

SEQ ID NO: 2879 - RNA, 14 nt, synthetic construct
  misc_feature 1..14: note = Antisense oligonucleotide
  source 1..14: mol_type = other RNA
tgcaacgatccgta

SEQ ID NO: 2880 - RNA, 14 nt, synthetic construct
  misc_feature 1..14: note = Antisense oligonucleotide
  source 1..14: mol_type = other RNA
ttggctcctgaact

SEQ ID NO: 2881 - RNA, 14 nt, synthetic construct
  misc_feature 1..14: note = Antisense oligonucleotide
  source 1..14: mol_type = other RNA
cctgtccacccatc

SEQ ID NO: 2882 - RNA, 14 nt, synthetic construct
  misc_feature 1..14: note = Antisense oligonucleotide
  source 1..14: mol_type = other RNA
tgcaacgatccgta

SEQ ID NO: 2883 - RNA, 14 nt, synthetic construct
  misc_feature 1..14: note = Antisense oligonucleotide
  source 1..14: mol_type = other RNA
ttggctcctgaact

SEQ ID NO: 2884 - RNA, 14 nt, synthetic construct
  misc_feature 1..14: note = Antisense oligonucleotide
  source 1..14: mol_type = other RNA
cctgtccacccatc

SEQ ID NO: 2885 - RNA, 14 nt, synthetic construct
  misc_feature 1..14: note = Antisense oligonucleotide
  source 1..14: mol_type = other RNA
ccgacgagcagcga

SEQ ID NO: 2886 - RNA, 14 nt, synthetic construct
  misc_feature 1..14: note = Antisense oligonucleotide
  source 1..14: mol_type = other RNA
tgcaacgatccgta

SEQ ID NO: 2887 - RNA, 14 nt, synthetic construct
  misc_feature 1..14: note = Antisense oligonucleotide
  source 1..14: mol_type = other RNA
ttggctcctgaact

SEQ ID NO: 2888 - RNA, 14 nt, synthetic construct
  misc_feature 1..14: note = Antisense oligonucleotide
  source 1..14: mol_type = other RNA
cctgtccacccatc

SEQ ID NO: 2889 - RNA, 14 nt, synthetic construct
  misc_feature 1..14: note = Antisense oligonucleotide
  source 1..14: mol_type = other RNA
ccgacgagcagcga

SEQ ID NO: 2890 - RNA, 14 nt, synthetic construct
  misc_feature 1..14: note = Antisense oligonucleotide
  source 1..14: mol_type = other RNA
tgcaacgatccgta

SEQ ID NO: 2891 - RNA, 14 nt, synthetic construct
  misc_feature 1..14: note = Antisense oligonucleotide
  source 1..14: mol_type = other RNA
ttggctcctgaact

SEQ ID NO: 2892 - RNA, 14 nt, synthetic construct
  misc_feature 1..14: note = Antisense oligonucleotide
  source 1..14: mol_type = other RNA
cctgtccacccatc

SEQ ID NO: 2893 - RNA, 14 nt, synthetic construct
  misc_feature 1..14: note = Antisense oligonucleotide
  source 1..14: mol_type = other RNA
ccgacgagcagcga

SEQ ID NO: 2894 - RNA, 14 nt, synthetic construct
  misc_feature 1..14: note = Antisense oligonucleotide
  source 1..14: mol_type = other RNA
tgcaacgatccgta

SEQ ID NO: 2895 - RNA, 14 nt, synthetic construct
  misc_feature 1..14: note = Antisense oligonucleotide
  source 1..14: mol_type = other RNA
ttggctcctgaact

SEQ ID NO: 2896 - RNA, 14 nt, synthetic construct
  misc_feature 1..14: note = Antisense oligonucleotide
  source 1..14: mol_type = other RNA
cctgtccacccatc

SEQ ID NO: 2897 - RNA, 14 nt, synthetic construct
  misc_feature 1..14: note = Antisense oligonucleotide
  source 1..14: mol_type = other RNA
tgcaacgatccgta

SEQ ID NO: 2898 - RNA, 14 nt, synthetic construct
  misc_feature 1..14: note = Antisense oligonucleotide
  source 1..14: mol_type = other RNA
ttggctcctgaact

SEQ ID NO: 2899 - RNA, 14 nt, synthetic construct
  misc_feature 1..14: note = Antisense oligonucleotide
  source 1..14: mol_type = other RNA
cctgtccacccatc

SEQ ID NO: 2900 - RNA, 14 nt, synthetic construct
  misc_feature 1..14: note = Antisense oligonucleotide
  source 1..14: mol_type = other RNA
ccgacgagcagcga

SEQ ID NO: 2901 - RNA, 14 nt, synthetic construct
  misc_feature 1..14: note = Antisense oligonucleotide
  source 1..14: mol_type = other RNA
tgcaacgatccgta

SEQ ID NO: 2902 - RNA, 14 nt, synthetic construct
  misc_feature 1..14: note = Antisense oligonucleotide
  source 1..14: mol_type = other RNA
ccgacgagcagcga

SEQ ID NO: 2903 - RNA, 14 nt, synthetic construct
  misc_feature 1..14: note = Antisense oligonucleotide
  source 1..14: mol_type = other RNA
tgcaacgatccgta

SEQ ID NO: 2904 - RNA, 14 nt, synthetic construct
  misc_feature 1..14: note = Antisense oligonucleotide
  source 1..14: mol_type = other RNA
ttggctcctgaact

SEQ ID NO: 2905 - RNA, 14 nt, synthetic construct
  misc_feature 1..14: note = Antisense oligonucleotide
  source 1..14: mol_type = other RNA
cctgtccacccatc

SEQ ID NO: 2906 - RNA, 14 nt, synthetic construct
  misc_feature 1..14: note = Antisense oligonucleotide
  source 1..14: mol_type = other RNA
ccgacgagcagcga

SEQ ID NO: 2907 - RNA, 14 nt, synthetic construct
  misc_feature 1..14: note = Antisense oligonucleotide
  source 1..14: mol_type = other RNA
tgcaacgatccgta

SEQ ID NO: 2908 - RNA, 14 nt, synthetic construct
  misc_feature 1..14: note = Antisense oligonucleotide
  source 1..14: mol_type = other RNA
ttggctcctgaact

SEQ ID NO: 2909 - RNA, 14 nt, synthetic construct
  misc_feature 1..14: note = Antisense oligonucleotide
  source 1..14: mol_type = other RNA
cctgtccacccatc

SEQ ID NO: 2910 - RNA, 14 nt, synthetic construct
  misc_feature 1..14: note = Antisense oligonucleotide
  source 1..14: mol_type = other RNA
tgcaacgatccgta

SEQ ID NO: 2911 - RNA, 14 nt, synthetic construct
  misc_feature 1..14: note = Antisense oligonucleotide
  source 1..14: mol_type = other RNA
ttggctcctgaact

SEQ ID NO: 2912 - RNA, 14 nt, synthetic construct
  misc_feature 1..14: note = Antisense oligonucleotide
  source 1..14: mol_type = other RNA
cctgtccacccatc

SEQ ID NO: 2913 - RNA, 14 nt, synthetic construct
  misc_feature 1..14: note = Antisense oligonucleotide
  source 1..14: mol_type = other RNA
ccgacgagcagcga

SEQ ID NO: 2914 - RNA, 14 nt, synthetic construct
  misc_feature 1..14: note = Antisense oligonucleotide
  source 1..14: mol_type = other RNA
tgcaacgatccgta

SEQ ID NO: 2915 - RNA, 14 nt, synthetic construct
  misc_feature 1..14: note = Antisense oligonucleotide
  source 1..14: mol_type = other RNA
ttggctcctgaact

SEQ ID NO: 2916 - RNA, 14 nt, synthetic construct
  misc_feature 1..14: note = Antisense oligonucleotide
  source 1..14: mol_type = other RNA
cctgtccacccatc

SEQ ID NO: 2917 - RNA, 14 nt, synthetic construct
  misc_feature 1..14: note = Antisense oligonucleotide
  source 1..14: mol_type = other RNA
ccgacgagcagcga

SEQ ID NO: 2918 - RNA, 14 nt, synthetic construct
  misc_feature 1..14: note = Antisense oligonucleotide
  source 1..14: mol_type = other RNA
tgcaacgatccgta

SEQ ID NO: 2919 - RNA, 14 nt, synthetic construct
  misc_feature 1..14: note = Antisense oligonucleotide
  source 1..14: mol_type = other RNA
ttggctcctgaact

SEQ ID NO: 2920 - RNA, 14 nt, synthetic construct
  misc_feature 1..14: note = Antisense oligonucleotide
  source 1..14: mol_type = other RNA
cctgtccacccatc

SEQ ID NO: 2921 - RNA, 14 nt, synthetic construct
  misc_feature 1..14: note = Antisense oligonucleotide
  source 1..14: mol_type = other RNA
ccgacgagcagcga

SEQ ID NO: 2922 - RNA, 14 nt, synthetic construct
  misc_feature 1..14: note = Antisense oligonucleotide
  source 1..14: mol_type = other RNA
tgcaacgatccgta

SEQ ID NO: 2923 - RNA, 14 nt, synthetic construct
  misc_feature 1..14: note = Antisense oligonucleotide
  source 1..14: mol_type = other RNA
ttggctcctgaact

SEQ ID NO: 2924 - RNA, 14 nt, synthetic construct
  misc_feature 1..14: note = Antisense oligonucleotide
  source 1..14: mol_type = other RNA
cctgtccacccatc

SEQ ID NO: 2925 - RNA, 14 nt, synthetic construct
  misc_feature 1..14: note = Antisense oligonucleotide
  source 1..14: mol_type = other RNA
tgcaacgatccgta

SEQ ID NO: 2926 - RNA, 14 nt, synthetic construct
  misc_feature 1..14: note = Antisense oligonucleotide
  source 1..14: mol_type = other RNA
ttggctcctgaact

SEQ ID NO: 2927 - RNA, 14 nt, synthetic construct
  misc_feature 1..14: note = Antisense oligonucleotide
  source 1..14: mol_type = other RNA
cctgtccacccatc

SEQ ID NO: 2928 - RNA, 14 nt, synthetic construct
  misc_feature 1..14: note = Antisense oligonucleotide
  source 1..14: mol_type = other RNA
ccgacgagcagcga

SEQ ID NO: 2929 - RNA, 14 nt, synthetic construct
  misc_feature 1..14: note = Antisense oligonucleotide
  source 1..14: mol_type = other RNA
tgcaacgatccgta

SEQ ID NO: 2930 - RNA, 14 nt, synthetic construct
  misc_feature 1..14: note = Antisense oligonucleotide
  source 1..14: mol_type = other RNA
tgcaacgatccgta

SEQ ID NO: 2931 - RNA, 14 nt, synthetic construct
  misc_feature 1..14: note = Antisense oligonucleotide
  source 1..14: mol_type = other RNA
ccgacgagcagcga

SEQ ID NO: 2932 - RNA, 14 nt, synthetic construct
  misc_feature 1..14: note = Antisense oligonucleotide
  source 1..14: mol_type = other RNA
tgcaacgatccgta

SEQ ID NO: 2933 - RNA, 14 nt, synthetic construct
  misc_feature 1..14: note = Antisense oligonucleotide
  source 1..14: mol_type = other RNA
ttggctcctgaact

SEQ ID NO: 2934 - RNA, 14 nt, synthetic construct
  misc_feature 1..14: note = Antisense oligonucleotide
  source 1..14: mol_type = other RNA
cctgtccacccatc

SEQ ID NO: 2935 - RNA, 14 nt, synthetic construct
  misc_feature 1..14: note = Antisense oligonucleotide
  source 1..14: mol_type = other RNA
ccgacgagcagcga

SEQ ID NO: 2936 - RNA, 14 nt, synthetic construct
  misc_feature 1..14: note = Antisense oligonucleotide
  source 1..14: mol_type = other RNA
tgcaacgatccgta

SEQ ID NO: 2937 - RNA, 14 nt, synthetic construct
  misc_feature 1..14: note = Antisense oligonucleotide
  source 1..14: mol_type = other RNA
ttggctcctgaact

SEQ ID NO: 2938 - RNA, 14 nt, synthetic construct
  misc_feature 1..14: note = Antisense oligonucleotide
  source 1..14: mol_type = other RNA
cctgtccacccatc

SEQ ID NO: 2939 - RNA, 14 nt, synthetic construct
  misc_feature 1..14: note = Antisense oligonucleotide
  source 1..14: mol_type = other RNA
tgcaacgatccgta

SEQ ID NO: 2940 - RNA, 14 nt, synthetic construct
  misc_feature 1..14: note = Antisense oligonucleotide
  source 1..14: mol_type = other RNA
ttggctcctgaact

SEQ ID NO: 2941 - RNA, 14 nt, synthetic construct
  misc_feature 1..14: note = Antisense oligonucleotide
  source 1..14: mol_type = other RNA
cctgtccacccatc

SEQ ID NO: 2942 - RNA, 14 nt, synthetic construct
  misc_feature 1..14: note = Antisense oligonucleotide
  source 1..14: mol_type = other RNA
tgcaacgatccgta

SEQ ID NO: 2943 - RNA, 14 nt, synthetic construct
  misc_feature 1..14: note = Antisense oligonucleotide
  source 1..14: mol_type = other RNA
ccgacgagcagcga

SEQ ID NO: 2944 - RNA, 14 nt, synthetic construct
  misc_feature 1..14: note = Antisense oligonucleotide
  source 1..14: mol_type = other RNA
tgcaacgatccgta

SEQ ID NO: 2945 - RNA, 14 nt, synthetic construct
  misc_feature 1..14: note = Antisense oligonucleotide
  source 1..14: mol_type = other RNA
ttggctcctgaact

SEQ ID NO: 2946 - RNA, 14 nt, synthetic construct
  misc_feature 1..14: note = Antisense oligonucleotide
  source 1..14: mol_type = other RNA
cctgtccacccatc

SEQ ID NO: 2947 - RNA, 14 nt, synthetic construct
  misc_feature 1..14: note = Antisense oligonucleotide
  source 1..14: mol_type = other RNA
ccgacgagcagcga

SEQ ID NO: 2948 - RNA, 14 nt, synthetic construct
  misc_feature 1..14: note = Antisense oligonucleotide
  source 1..14: mol_type = other RNA
tgcaacgatccgta

SEQ ID NO: 2949 - RNA, 14 nt, synthetic construct
  misc_feature 1..14: note = Antisense oligonucleotide
  source 1..14: mol_type = other RNA
ttggctcctgaact

SEQ ID NO: 2950 - RNA, 14 nt, synthetic construct
  misc_feature 1..14: note = Antisense oligonucleotide
  source 1..14: mol_type = other RNA
cctgtccacccatc

SEQ ID NO: 2951 - RNA, 14 nt, synthetic construct
  misc_feature 1..14: note = Antisense oligonucleotide
  source 1..14: mol_type = other RNA
tgcaacgatccgta

SEQ ID NO: 2952 - RNA, 14 nt, synthetic construct
  misc_feature 1..14: note = Antisense oligonucleotide
  source 1..14: mol_type = other RNA
ttggctcctgaact

SEQ ID NO: 2953 - RNA, 14 nt, synthetic construct
  misc_feature 1..14: note = Antisense oligonucleotide
  source 1..14: mol_type = other RNA
cctgtccacccatc

SEQ ID NO: 2954 - RNA, 14 nt, synthetic construct
  misc_feature 1..14: note = Antisense oligonucleotide
  source 1..14: mol_type = other RNA
ccgacgagcagcga

SEQ ID NO: 2955 - RNA, 14 nt, synthetic construct
  misc_feature 1..14: note = Antisense oligonucleotide
  source 1..14: mol_type = other RNA
tgcaacgatccgta

SEQ ID NO: 2956 - RNA, 14 nt, synthetic construct
  misc_feature 1..14: note = Antisense oligonucleotide
  source 1..14: mol_type = other RNA
ttggctcctgaact

SEQ ID NO: 2957 - RNA, 14 nt, synthetic construct
  misc_feature 1..14: note = Antisense oligonucleotide
  source 1..14: mol_type = other RNA
cctgtccacccatc

SEQ ID NO: 2958 - RNA, 14 nt, synthetic construct
  misc_feature 1..14: note = Antisense oligonucleotide
  source 1..14: mol_type = other RNA
ccgacgagcagcga

SEQ ID NO: 2959 - RNA, 14 nt, synthetic construct
  misc_feature 1..14: note = Antisense oligonucleotide
  source 1..14: mol_type = other RNA
tgcaacgatccgta

SEQ ID NO: 2960 - RNA, 14 nt, synthetic construct
  misc_feature 1..14: note = Antisense oligonucleotide
  source 1..14: mol_type = other RNA
ccgacgagcagcga

SEQ ID NO: 2961 - RNA, 14 nt, synthetic construct
  misc_feature 1..14: note = Antisense oligonucleotide
  source 1..14: mol_type = other RNA
tgcaacgatccgta

SEQ ID NO: 2962 - RNA, 14 nt, synthetic construct
  misc_feature 1..14: note = Antisense oligonucleotide
  source 1..14: mol_type = other RNA
ttggctcctgaact

SEQ ID NO: 2963 - RNA, 14 nt, synthetic construct
  misc_feature 1..14: note = Antisense oligonucleotide
  source 1..14: mol_type = other RNA
cctgtccacccatc

SEQ ID NO: 2964 - RNA, 14 nt, synthetic construct
  misc_feature 1..14: note = Antisense oligonucleotide
  source 1..14: mol_type = other RNA
ccgacgagcagcga

SEQ ID NO: 2965 - RNA, 14 nt, synthetic construct
  misc_feature 1..14: note = Antisense oligonucleotide
  source 1..14: mol_type = other RNA
tgcaacgatccgta

SEQ ID NO: 2966 - RNA, 14 nt, synthetic construct
  misc_feature 1..14: note = Antisense oligonucleotide
  source 1..14: mol_type = other RNA
ttggctcctgaact

SEQ ID NO: 2967 - RNA, 14 nt, synthetic construct
  misc_feature 1..14: note = Antisense oligonucleotide
  source 1..14: mol_type = other RNA
cctgtccacccatc

SEQ ID NO: 2968 - RNA, 14 nt, synthetic construct
  misc_feature 1..14: note = Antisense oligonucleotide
  source 1..14: mol_type = other RNA
tgcaacgatccgta

SEQ ID NO: 2969 - RNA, 14 nt, synthetic construct
  misc_feature 1..14: note = Antisense oligonucleotide
  source 1..14: mol_type = other RNA
ttggctcctgaact

SEQ ID NO: 2970 - RNA, 14 nt, synthetic construct
  misc_feature 1..14: note = Antisense oligonucleotide
  source 1..14: mol_type = other RNA
cctgtccacccatc

SEQ ID NO: 2971 - RNA, 14 nt, synthetic construct
  misc_feature 1..14: note = Antisense oligonucleotide
  source 1..14: mol_type = other RNA
ccgacgagcagcga

SEQ ID NO: 2972 - RNA, 14 nt, synthetic construct
  misc_feature 1..14: note = Antisense oligonucleotide
  source 1..14: mol_type = other RNA
tgcaacgatccgta

SEQ ID NO: 2973 - RNA, 14 nt, synthetic construct
  misc_feature 1..14: note = Antisense oligonucleotide
  source 1..14: mol_type = other RNA
tgcaacgatccgta

SEQ ID NO: 2974 - RNA, 14 nt, synthetic construct
  misc_feature 1..14: note = Antisense oligonucleotide
  source 1..14: mol_type = other RNA
ccgacgagcagcga

SEQ ID NO: 2975 - RNA, 14 nt, synthetic construct
  misc_feature 1..14: note = Antisense oligonucleotide
  source 1..14: mol_type = other RNA
tgcaacgatccgta

SEQ ID NO: 2976 - RNA, 14 nt, synthetic construct
  misc_feature 1..14: note = Antisense oligonucleotide
  source 1..14: mol_type = other RNA
ttggctcctgaact

SEQ ID NO: 2977 - RNA, 14 nt, synthetic construct
  misc_feature 1..14: note = Antisense oligonucleotide
  source 1..14: mol_type = other RNA
cctgtccacccatc

SEQ ID NO: 2978 - RNA, 14 nt, synthetic construct
  misc_feature 1..14: note = Antisense oligonucleotide
  source 1..14: mol_type = other RNA
ccgacgagcagcga

SEQ ID NO: 2979 - RNA, 14 nt, synthetic construct
  misc_feature 1..14: note = Antisense oligonucleotide
  source 1..14: mol_type = other RNA
tgcaacgatccgta

SEQ ID NO: 2980 - RNA, 14 nt, synthetic construct
  misc_feature 1..14: note = Antisense oligonucleotide
  source 1..14: mol_type = other RNA
ttggctcctgaact

SEQ ID NO: 2981 - RNA, 14 nt, synthetic construct
  misc_feature 1..14: note = Antisense oligonucleotide
  source 1..14: mol_type = other RNA
cctgtccacccatc

SEQ ID NO: 2982 - RNA, 14 nt, synthetic construct
  misc_feature 1..14: note = Antisense oligonucleotide
  source 1..14: mol_type = other RNA
tgcaacgatccgta

SEQ ID NO: 2983 - RNA, 14 nt, synthetic construct
  misc_feature 1..14: note = Antisense oligonucleotide
  source 1..14: mol_type = other RNA
ttggctcctgaact

SEQ ID NO: 2984 - RNA, 14 nt, synthetic construct
  misc_feature 1..14: note = Antisense oligonucleotide
  source 1..14: mol_type = other RNA
cctgtccacccatc

SEQ ID NO: 2985 - RNA, 14 nt, synthetic construct
  misc_feature 1..14: note = Antisense oligonucleotide
  source 1..14: mol_type = other RNA
ccgacgagcagcga

SEQ ID NO: 2986 - RNA, 14 nt, synthetic construct
  misc_feature 1..14: note = Antisense oligonucleotide
  source 1..14: mol_type = other RNA
tgcaacgatccgta

SEQ ID NO: 2987 - RNA, 14 nt, synthetic construct
  misc_feature 1..14: note = Antisense oligonucleotide
  source 1..14: mol_type = other RNA
ttggctcctgaact

SEQ ID NO: 2988 - RNA, 14 nt, synthetic construct
  misc_feature 1..14: note = Antisense oligonucleotide
  source 1..14: mol_type = other RNA
cctgtccacccatc

SEQ ID NO: 2989 - RNA, 14 nt, synthetic construct
  misc_feature 1..14: note = Antisense oligonucleotide
  source 1..14: mol_type = other RNA
ccgacgagcagcga

SEQ ID NO: 2990 - RNA, 14 nt, synthetic construct
  misc_feature 1..14: note = Antisense oligonucleotide
  source 1..14: mol_type = other RNA
tgcaacgatccgta

SEQ ID NO: 2991 - RNA, 14 nt, synthetic construct
  misc_feature 1..14: note = Antisense oligonucleotide
  source 1..14: mol_type = other RNA
ttggctcctgaact

SEQ ID NO: 2992 - RNA, 14 nt, synthetic construct
  misc_feature 1..14: note = Antisense oligonucleotide
  source 1..14: mol_type = other RNA
tctggaagttctac

SEQ ID NO: 2993 - RNA, 14 nt, synthetic construct
  misc_feature 1..14: note = Antisense oligonucleotide
  source 1..14: mol_type = other RNA
tgtcactactgcta

SEQ ID NO: 2994 - RNA, 14 nt, synthetic construct
  misc_feature 1..14: note = Antisense oligonucleotide
  source 1..14: mol_type = other RNA
ccgagcacgacggc

SEQ ID NO: 2995 - RNA, 14 nt, synthetic construct
  misc_feature 1..14: note = Antisense oligonucleotide
  source 1..14: mol_type = other RNA
ccgacgagcagcga

SEQ ID NO: 2996 - RNA, 14 nt, synthetic construct
  misc_feature 1..14: note = Antisense oligonucleotide
  source 1..14: mol_type = other RNA
cctgtccacccatc

SEQ ID NO: 2997 - RNA, 14 nt, synthetic construct
  misc_feature 1..14: note = Antisense oligonucleotide
  source 1..14: mol_type = other RNA
ccgacgagcagcga

SEQ ID NO: 2998 - RNA, 14 nt, synthetic construct
  misc_feature 1..14: note = Antisense oligonucleotide
  source 1..14: mol_type = other RNA
tgcaacgatccgta

SEQ ID NO: 2999 - RNA, 14 nt, synthetic construct
  misc_feature 1..14: note = Antisense oligonucleotide
  source 1..14: mol_type = other RNA
tgcaacgatccgta

SEQ ID NO: 3000 - RNA, 20 nt, synthetic construct
  misc_feature 1..20: note = Antisense oligonucleotide
  modified_base 1: mod_base = OTHER; note = misc_feature - bicyclic nucleic acid scaffold modification
  modified_base 6: mod_base = OTHER; note = misc_feature - bicyclic nucleic acid scaffold modification
  modified_base 11: mod_base = OTHER; note = misc_feature - bicyclic nucleic acid scaffold modification
  modified_base 20: mod_base = OTHER; note = misc_feature - bicyclic nucleic acid scaffold modification
  source 1..20: mol_type = other RNA
catttctcaacagatctgtc

SEQ ID NO: 3001 - RNA, 20 nt, synthetic construct
  misc_feature 1..20: note = Antisense oligonucleotide
  modified_base 1: mod_base = OTHER; note = misc_feature - bicyclic nucleic acid scaffold modification
  modified_base 11: mod_base = OTHER; note = misc_feature - bicyclic nucleic acid scaffold modification
  modified_base 16: mod_base = OTHER; note = misc_feature - bicyclic nucleic acid scaffold modification
  modified_base 20: mod_base = OTHER; note = misc_feature - bicyclic nucleic acid scaffold modification
  source 1..20: mol_type = other RNA
catttctcaacagatctgtc

SEQ ID NO: 3002 - RNA, 20 nt, synthetic construct
  misc_feature 1..20: note = Antisense oligonucleotide
  modified_base 1: mod_base = OTHER; note = misc_feature - bicyclic nucleic acid scaffold modification
  modified_base 13: mod_base = OTHER; note = misc_feature - bicyclic nucleic acid scaffold modification
  modified_base 18: mod_base = OTHER; note = misc_feature - bicyclic nucleic acid scaffold modification
  modified_base 20: mod_base = OTHER; note = misc_feature - bicyclic nucleic acid scaffold modification
  source 1..20: mol_type = other RNA
catttctcaacagatctgtc

SEQ ID NO: 3003 - RNA, 20 nt, synthetic construct
  modified_base 19: mod_base = OTHER; note = thymine
  misc_feature 1..20: note = Antisense oligonucleotide
  modified_base 1..2: mod_base = OTHER; note = misc_feature - bicyclic nucleic acid scaffold modification
  modified_base 19..20: mod_base = OTHER; note = misc_feature - bicyclic nucleic acid scaffold modification
  source 1..20: mol_type = other RNA
catttctcaacagatctgtc

SEQ ID NO: 3004 - RNA, 20 nt, synthetic construct
  modified_base 19: mod_base = OTHER; note = thymine
  misc_feature 1..20: note = Antisense oligonucleotide
  modified_base 1..2: mod_base = OTHER; note = misc_feature - bicyclic nucleic acid scaffold modification
  modified_base 8: mod_base = OTHER; note = misc_feature - bicyclic nucleic acid scaffold modification
  modified_base 11: mod_base = OTHER; note = misc_feature - bicyclic nucleic acid scaffold modification
  modified_base 19..20: mod_base = OTHER; note = misc_feature - bicyclic nucleic acid scaffold modification
  source 1..20: mol_type = other RNA
catttctcaacagatctgtc

SEQ ID NO: 3005 - RNA, 20 nt, synthetic construct
  misc_feature 1..20: note = Antisense oligonucleotide
  modified_base 1: mod_base = OTHER; note = misc_feature - bicyclic nucleic acid scaffold modification
  modified_base 20: mod_base = OTHER; note = misc_feature - bicyclic nucleic acid scaffold modification
  source 1..20: mol_type = other RNA
atttctcaacagatctgtca

SEQ ID NO: 3006 - RNA, 20 nt, synthetic construct
  misc_feature 1..20: note = Antisense oligonucleotide
  modified_base 1: mod_base = OTHER; note = misc_feature - bicyclic nucleic acid scaffold modification
  modified_base 5: mod_base = OTHER; note = misc_feature - bicyclic nucleic acid scaffold modification
  modified_base 20: mod_base = OTHER; note = misc_feature - bicyclic nucleic acid scaffold modification
  source 1..20: mol_type = other RNA
atttctcaacagatctgtca

SEQ ID NO: 3007 - RNA, 20 nt, synthetic construct
  misc_feature 1..20: note = Antisense oligonucleotide
  modified_base 1: mod_base = OTHER; note = misc_feature - bicyclic nucleic acid scaffold modification
  modified_base 7: mod_base = OTHER; note = misc_feature - bicyclic nucleic acid scaffold modification
  modified_base 20: mod_base = OTHER; note = misc_feature - bicyclic nucleic acid scaffold modification
  source 1..20: mol_type = other RNA
atttctcaacagatctgtca

SEQ ID NO: 3008 - RNA, 20 nt, synthetic construct
  misc_feature 1..20: note = Antisense oligonucleotide
  modified_base 1: mod_base = OTHER; note = misc_feature - bicyclic nucleic acid scaffold modification
  modified_base 10: mod_base = OTHER; note = misc_feature - bicyclic nucleic acid scaffold modification
  modified_base 20: mod_base = OTHER; note = misc_feature - bicyclic nucleic acid scaffold modification
  source 1..20: mol_type = other RNA
atttctcaacagatctgtca

SEQ ID NO: 3009 - RNA, 20 nt, synthetic construct
  misc_feature 1..20: note = Antisense oligonucleotide
  modified_base 1: mod_base = OTHER; note = misc_feature - bicyclic nucleic acid scaffold modification
  modified_base 12: mod_base = OTHER; note = misc_feature - bicyclic nucleic acid scaffold modification
  modified_base 20: mod_base = OTHER; note = misc_feature - bicyclic nucleic acid scaffold modification
  source 1..20: mol_type = other RNA
atttctcaacagatctgtca

SEQ ID NO: 3010 - RNA, 20 nt, synthetic construct
  misc_feature 1..20: note = Antisense oligonucleotide
  modified_base 1: mod_base = OTHER; note = misc_feature - bicyclic nucleic acid scaffold modification
  modified_base 15: mod_base = OTHER; note = misc_feature - bicyclic nucleic acid scaffold modification
  modified_base 20: mod_base = OTHER; note = misc_feature - bicyclic nucleic acid scaffold modification
  source 1..20: mol_type = other RNA
atttctcaacagatctgtca

SEQ ID NO: 3011 - RNA, 20 nt, synthetic construct
  misc_feature 1..20: note = Antisense oligonucleotide
  modified_base 1: mod_base = OTHER; note = misc_feature - bicyclic nucleic acid scaffold modification
  modified_base 17: mod_base = OTHER; note = misc_feature - bicyclic nucleic acid scaffold modification
  modified_base 20: mod_base = OTHER; note = misc_feature - bicyclic nucleic acid scaffold modification
  source 1..20: mol_type = other RNA
atttctcaacagatctgtca

SEQ ID NO: 3012 - RNA, 20 nt, synthetic construct
  modified_base 2: mod_base = OTHER; note = thymine
  misc_feature 1..20: note = Antisense oligonucleotide
  modified_base 1..2: mod_base = OTHER; note = misc_feature - bicyclic nucleic acid scaffold modification
  modified_base 19..20: mod_base = OTHER; note = misc_feature - bicyclic nucleic acid scaffold modification
  source 1..20: mol_type = other RNA
atttctcaacagatctgtca

SEQ ID NO: 3013 - RNA, 20 nt, synthetic construct
  misc_feature 1..20: note = Antisense oligonucleotide
  modified_base 1: mod_base = OTHER; note = misc_feature - bicyclic nucleic acid scaffold modification
  modified_base 5: mod_base = OTHER; note = misc_feature - bicyclic nucleic acid scaffold modification
  modified_base 10: mod_base = OTHER; note = misc_feature - bicyclic nucleic acid scaffold modification
  modified_base 20: mod_base = OTHER; note = misc_feature - bicyclic nucleic acid scaffold modification
  source 1..20: mol_type = other RNA
atttctcaacagatctgtca

SEQ ID NO: 3014 - RNA, 20 nt, synthetic construct
  misc_feature 1..20: note = Antisense oligonucleotide
  modified_base 1: mod_base = OTHER; note = misc_feature - bicyclic nucleic acid scaffold modification
  modified_base 10: mod_base = OTHER; note = misc_feature - bicyclic nucleic acid scaffold modification
  modified_base 15: mod_base = OTHER; note = misc_feature - bicyclic nucleic acid scaffold modification
  modified_base 20: mod_base = OTHER; note = misc_feature - bicyclic nucleic acid scaffold modification
  source 1..20: mol_type = other RNA
atttctcaacagatctgtca

SEQ ID NO: 3015 - RNA, 20 nt, synthetic construct
  misc_feature 1..20: note = Antisense oligonucleotide
  modified_base 1: mod_base = OTHER; note = misc_feature - bicyclic nucleic acid scaffold modification
  modified_base 12: mod_base = OTHER; note = misc_feature - bicyclic nucleic acid scaffold modification
  modified_base 17: mod_base = OTHER; note = misc_feature - bicyclic nucleic acid scaffold modification
  modified_base 20: mod_base = OTHER; note = misc_feature - bicyclic nucleic acid scaffold modification
  source 1..20: mol_type = other RNA
atttctcaacagatctgtca

SEQ ID NO: 3016 - RNA, 20 nt, synthetic construct
  misc_feature 1..20: note = Antisense oligonucleotide
  modified_base 1: mod_base = OTHER; note = misc_feature - bicyclic nucleic acid scaffold modification
  modified_base 5: mod_base = OTHER; note = misc_feature - bicyclic nucleic acid scaffold modification
  modified_base 10: mod_base = OTHER; note = misc_feature - bicyclic nucleic acid scaffold modification
  modified_base 15: mod_base = OTHER; note = misc_feature - bicyclic nucleic acid scaffold modification
  modified_base 20: mod_base = OTHER; note = misc_feature - bicyclic nucleic acid scaffold modification
  source 1..20: mol_type = other RNA
atttctcaacagatctgtca

SEQ ID NO: 3017 - RNA, 20 nt, synthetic construct
  misc_feature 1..20: note = Antisense oligonucleotide
  modified_base 1: mod_base = OTHER; note = misc_feature - bicyclic nucleic acid scaffold modification
  modified_base 5: mod_base = OTHER; note = misc_feature - bicyclic nucleic acid scaffold modification
  modified_base 7: mod_base = OTHER; note = misc_feature - bicyclic nucleic acid scaffold modification
  modified_base 12: mod_base = OTHER; note = misc_feature - bicyclic nucleic acid scaffold modification
  modified_base 17: mod_base = OTHER; note = misc_feature - bicyclic nucleic acid scaffold modification
  modified_base 20: mod_base = OTHER; note = misc_feature - bicyclic nucleic acid scaffold modification
  source 1..20: mol_type = other RNA
atttctcaacagatctgtca

SEQ ID NO: 3018 - RNA, 18 nt, synthetic construct
  misc_feature 1..18: note = Antisense oligonucleotide
  modified_base 1: mod_base = OTHER; note = misc_feature - bicyclic nucleic acid scaffold modification
  modified_base 18: mod_base = OTHER; note = misc_feature - bicyclic nucleic acid scaffold modification
  source 1..18: mol_type = other RNA
gccatttctcaacagatc

SEQ ID NO: 3019 - RNA, 18 nt, synthetic construct
  misc_feature 1..18: note = Antisense oligonucleotide
  modified_base 1: mod_base = OTHER; note = misc_feature - bicyclic nucleic acid scaffold modification
  modified_base 3: mod_base = OTHER; note = misc_feature - bicyclic nucleic acid scaffold modification
  modified_base 18: mod_base = OTHER; note = misc_feature - bicyclic nucleic acid scaffold modification
  source 1..18: mol_type = other RNA
gccatttctcaacagatc

SEQ ID NO: 3020 - RNA, 18 nt, synthetic construct
  misc_feature 1..18: note = Antisense oligonucleotide
  modified_base 1: mod_base = OTHER; note = misc_feature - bicyclic nucleic acid scaffold modification
  modified_base 8: mod_base = OTHER; note = misc_feature - bicyclic nucleic acid scaffold modification
  modified_base 18: mod_base = OTHER; note = misc_feature - bicyclic nucleic acid scaffold modification
  source 1..18: mol_type = other RNA
gccatttctcaacagatc

SEQ ID NO: 3021 - RNA, 18 nt, synthetic construct
  misc_feature 1..18: note = Antisense oligonucleotide
  modified_base 1: mod_base = OTHER; note = misc_feature - bicyclic nucleic acid scaffold modification
  modified_base 10: mod_base = OTHER; note = misc_feature - bicyclic nucleic acid scaffold modification
  modified_base 18: mod_base = OTHER; note = misc_feature - bicyclic nucleic acid scaffold modification
  source 1..18: mol_type = other RNA
gccatttctcaacagatc

SEQ ID NO: 3022 - RNA, 18 nt, synthetic construct
  misc_feature 1..18: note = Antisense oligonucleotide
  modified_base 1: mod_base = OTHER; note = misc_feature - bicyclic nucleic acid scaffold modification
  modified_base 13: mod_base = OTHER; note = misc_feature - bicyclic nucleic acid scaffold modification
  modified_base 18: mod_base = OTHER; note = misc_feature - bicyclic nucleic acid scaffold modification
  source 1..18: mol_type = other RNA
gccatttctcaacagatc

SEQ ID NO: 3023 - RNA, 18 nt, synthetic construct
  misc_feature 1..18: note = Antisense oligonucleotide
  modified_base 1: mod_base = OTHER; note = misc_feature - bicyclic nucleic acid scaffold modification
  modified_base 15: mod_base = OTHER; note = misc_feature - bicyclic nucleic acid scaffold modification
  modified_base 18: mod_base = OTHER; note = misc_feature - bicyclic nucleic acid scaffold modification
  source 1..18: mol_type = other RNA
gccatttctcaacagatc

SEQ ID NO: 3024 - RNA, 18 nt, synthetic construct
  misc_feature 1..18: note = Antisense oligonucleotide
  modified_base 1: mod_base = OTHER; note = misc_feature - bicyclic nucleic acid scaffold modification
  modified_base 3: mod_base = OTHER; note = misc_feature - bicyclic nucleic acid scaffold modification
  modified_base 15: mod_base = OTHER; note = misc_feature - bicyclic nucleic acid scaffold modification
  modified_base 18: mod_base = OTHER; note = misc_feature - bicyclic nucleic acid scaffold modification
  source 1..18: mol_type = other RNA
gccatttctcaacagatc

SEQ ID NO: 3025 - RNA, 18 nt, synthetic construct
  misc_feature 1..18: note = Antisense oligonucleotide
  modified_base 1: mod_base = OTHER; note = misc_feature - bicyclic nucleic acid scaffold modification
  modified_base 8: mod_base = OTHER; note = misc_feature - bicyclic nucleic acid scaffold modification
  modified_base 13: mod_base = OTHER; note = misc_feature - bicyclic nucleic acid scaffold modification
  modified_base 18: mod_base = OTHER; note = misc_feature - bicyclic nucleic acid scaffold modification
  source 1..18: mol_type = other RNA
gccatttctcaacagatc

SEQ ID NO: 3026 - RNA, 18 nt, synthetic construct
  misc_feature 1..18: note = Antisense oligonucleotide
  modified_base 1: mod_base = OTHER; note = misc_feature - bicyclic nucleic acid scaffold modification
  modified_base 8: mod_base = OTHER; note = misc_feature - bicyclic nucleic acid scaffold modification
  modified_base 15: mod_base = OTHER; note = misc_feature - bicyclic nucleic acid scaffold modification
  modified_base 18: mod_base = OTHER; note = misc_feature - bicyclic nucleic acid scaffold modification
  source 1..18: mol_type = other RNA
gccatttctcaacagatc

SEQ ID NO: 3027 - RNA, 18 nt, synthetic construct
  modified_base 17: mod_base = OTHER; note = thymine
  misc_feature 1..18: note = Antisense oligonucleotide
  modified_base 1..2: mod_base = OTHER; note = misc_feature - bicyclic nucleic acid scaffold modification
  modified_base 17..18: mod_base = OTHER; note = misc_feature - bicyclic nucleic acid scaffold modification
  source 1..18: mol_type = other RNA
gccatttctcaacagatc

SEQ ID NO: 3028 - RNA, 18 nt, synthetic construct
  misc_feature 1..18: note = Antisense oligonucleotide
  modified_base 1: mod_base = OTHER; note = misc_feature - bicyclic nucleic acid scaffold modification
  modified_base 3: mod_base = OTHER; note = misc_feature - bicyclic nucleic acid scaffold modification
  modified_base 8: mod_base = OTHER; note = misc_feature - bicyclic nucleic acid scaffold modification
  modified_base 13: mod_base = OTHER; note = misc_feature - bicyclic nucleic acid scaffold modification
  modified_base 18: mod_base = OTHER; note = misc_feature - bicyclic nucleic acid scaffold modification
  source 1..18: mol_type = other RNA
gccatttctcaacagatc

SEQ ID NO: 3029 - RNA, 18 nt, synthetic construct
  modified_base 17: mod_base = OTHER; note = thymine
  misc_feature 1..18: note = Antisense oligonucleotide
  modified_base 1..2: mod_base = OTHER; note = misc_feature - bicyclic nucleic acid scaffold modification
  modified_base 10: mod_base = OTHER; note = misc_feature - bicyclic nucleic acid scaffold modification
  modified_base 17..18: mod_base = OTHER; note = misc_feature - bicyclic nucleic acid scaffold modification
  source 1..18: mol_type = other RNA
gccatttctcaacagatc

SEQ ID NO: 3030 - RNA, 18 nt, synthetic construct
  modified_base 18: mod_base = OTHER; note = thymine
  misc_feature 1..18: note = Antisense oligonucleotide
  modified_base 1: mod_base = OTHER; note = misc_feature - bicyclic nucleic acid scaffold modification
  modified_base 18: mod_base = OTHER; note = misc_feature - bicyclic nucleic acid scaffold modification
  source 1..18: mol_type = other RNA
ccatttctcaacagatct

SEQ ID NO: 3031 - RNA, 18 nt, synthetic construct
  modified_base 18: mod_base = OTHER; note = thymine
  misc_feature 1..18: note = Antisense oligonucleotide
  modified_base 1: mod_base = OTHER; note = misc_feature - bicyclic nucleic acid scaffold modification
  modified_base 7: mod_base = OTHER; note = misc_feature - bicyclic nucleic acid scaffold modification
  modified_base 18: mod_base = OTHER; note = misc_feature - bicyclic nucleic acid scaffold modification
  source 1..18: mol_type = other RNA
ccatttctcaacagatct

SEQ ID NO: 3032 - RNA, 18 nt, synthetic construct
  modified_base 18: mod_base = OTHER; note = thymine
  misc_feature 1..18: note = Antisense oligonucleotide
  modified_base 1: mod_base = OTHER; note = misc_feature - bicyclic nucleic acid scaffold modification
  modified_base 9: mod_base = OTHER; note = misc_feature - bicyclic nucleic acid scaffold modification
  modified_base 18: mod_base = OTHER; note = misc_feature - bicyclic nucleic acid scaffold modification
  source 1..18: mol_type = other RNA
ccatttctcaacagatct

SEQ ID NO: 3033 - RNA, 18 nt, synthetic construct
  modified_base 18: mod_base = OTHER; note = thymine
  misc_feature 1..18: note = Antisense oligonucleotide
  modified_base 1: mod_base = OTHER; note = misc_feature - bicyclic nucleic acid scaffold modification
  modified_base 12: mod_base = OTHER; note = misc_feature - bicyclic nucleic acid scaffold modification
  modified_base 18: mod_base = OTHER; note = misc_feature - bicyclic nucleic acid scaffold modification
  source 1..18: mol_type = other RNA
ccatttctcaacagatct

SEQ ID NO: 3034 - RNA, 18 nt, synthetic construct
  modified_base 18: mod_base = OTHER; note = thymine
  misc_feature 1..18: note = Antisense oligonucleotide
  modified_base 1: mod_base = OTHER; note = misc_feature - bicyclic nucleic acid scaffold modification
  modified_base 14: mod_base = OTHER; note = misc_feature - bicyclic nucleic acid scaffold modification
  modified_base 18: mod_base = OTHER; note = misc_feature - bicyclic nucleic acid scaffold modification
  source 1..18: mol_type = other RNA
ccatttctcaacagatct

SEQ ID NO: 3035 - RNA, 18 nt, synthetic construct
  modified_base 18: mod_base = OTHER; note = thymine
  misc_feature 1..18: note = Antisense oligonucleotide
  modified_base 1: mod_base = OTHER; note = misc_feature - bicyclic nucleic acid scaffold modification
  modified_base 7: mod_base = OTHER; note = misc_feature - bicyclic nucleic acid scaffold modification
  modified_base 14: mod_base = OTHER; note = misc_feature - bicyclic nucleic acid scaffold modification
  modified_base 18: mod_base = OTHER; note = misc_feature - bicyclic nucleic acid scaffold modification
  source 1..18: mol_type = other RNA
ccatttctcaacagatct

SEQ ID NO: 3036 - RNA, 18 nt, synthetic construct
  modified_base 18: mod_base = OTHER; note = thymine
  misc_feature 1..18: note = Antisense oligonucleotide
  modified_base 1: mod_base = OTHER; note = misc_feature - bicyclic nucleic acid scaffold modification
  modified_base 7: mod_base = OTHER; note = misc_feature - bicyclic nucleic acid scaffold modification
  modified_base 9: mod_base = OTHER; note = misc_feature - bicyclic nucleic acid scaffold modification
  modified_base 18: mod_base = OTHER; note = misc_feature - bicyclic nucleic acid scaffold modification
  source 1..18: mol_type = other RNA
ccatttctcaacagatct

SEQ ID NO: 3037 - RNA, 18 nt, synthetic construct
  modified_base 18: mod_base = OTHER; note = thymine
  misc_feature 1..18: note = Antisense oligonucleotide
  modified_base 1: mod_base = OTHER; note = misc_feature - bicyclic nucleic acid scaffold modification
  modified_base 9: mod_base = OTHER; note = misc_feature - bicyclic nucleic acid scaffold modification
  modified_base 14: mod_base = OTHER; note = misc_feature - bicyclic nucleic acid scaffold modification
  modified_base 18: mod_base = OTHER; note = misc_feature - bicyclic nucleic acid scaffold modification
  source 1..18: mol_type = other RNA
ccatttctcaacagatct

SEQ ID NO: 3038 - RNA, 18 nt, synthetic construct
  modified_base 18: mod_base = OTHER; note = thymine
  misc_feature 1..18: note = Antisense oligonucleotide
  modified_base 1..2: mod_base = OTHER; note = misc_feature - bicyclic nucleic acid scaffold modification
  modified_base 17..18: mod_base = OTHER; note = misc_feature - bicyclic nucleic acid scaffold modification
  source 1..18: mol_type = other RNA
ccatttctcaacagatct

SEQ ID NO: 3039 - RNA, 18 nt, synthetic construct
  modified_base 18: mod_base = OTHER; note = thymine
  misc_feature 1..18: note = Antisense oligonucleotide
  modified_base 1: mod_base = OTHER; note = misc_feature - bicyclic nucleic acid scaffold modification
  modified_base 14: mod_base = OTHER; note = misc_feature - bicyclic nucleic acid scaffold modification
  modified_base 17..18: mod_base = OTHER; note = misc_feature - bicyclic nucleic acid scaffold modification
  source 1..18: mol_type = other RNA
ccatttctcaacagatct

SEQ ID NO: 3040 - RNA, 18 nt, synthetic construct
  modified_base 18: mod_base = OTHER; note = thymine
  misc_feature 1..18: note = Antisense oligonucleotide
  modified_base 1: mod_base = OTHER; note = misc_feature - bicyclic nucleic acid scaffold modification
  modified_base 9: mod_base = OTHER; note = misc_feature - bicyclic nucleic acid scaffold modification
  modified_base 14: mod_base = OTHER; note = misc_feature - bicyclic nucleic acid scaffold modification
  modified_base 17..18: mod_base = OTHER; note = misc_feature - bicyclic nucleic acid scaffold modification
  source 1..18: mol_type = other RNA
ccatttctcaacagatct

SEQ ID NO: 3041 - RNA, 18 nt, synthetic construct
  misc_feature 1..18: note = Antisense oligonucleotide
  modified_base 1: mod_base = OTHER; note = misc_feature - bicyclic nucleic acid scaffold modification
  modified_base 18: mod_base = OTHER; note = misc_feature - bicyclic nucleic acid scaffold modification
  source 1..18: mol_type = other RNA
catttctcaacagatctg

SEQ ID NO: 3042 - RNA, 18 nt, synthetic construct
  misc_feature 1..18: note = Antisense oligonucleotide
  modified_base 1: mod_base = OTHER; note = misc_feature - bicyclic nucleic acid scaffold modification
  modified_base 6: mod_base = OTHER; note = misc_feature - bicyclic nucleic acid scaffold modification
  modified_base 18: mod_base = OTHER; note = misc_feature - bicyclic nucleic acid scaffold modification
  source 1..18: mol_type = other RNA
catttctcaacagatctg

SEQ ID NO: 3043 - RNA, 18 nt, synthetic construct
  misc_feature 1..18: note = Antisense oligonucleotide
  modified_base 1: mod_base = OTHER; note = misc_feature - bicyclic nucleic acid scaffold modification
  modified_base 8: mod_base = OTHER; note = misc_feature - bicyclic nucleic acid scaffold modification
  modified_base 18: mod_base = OTHER; note = misc_feature - bicyclic nucleic acid scaffold modification
  source 1..18: mol_type = other RNA
catttctcaacagatctg

SEQ ID NO: 3044 - RNA, 18 nt, synthetic construct
  misc_feature 1..18: note = Antisense oligonucleotide
  modified_base 1: mod_base = OTHER; note = misc_feature - bicyclic nucleic acid scaffold modification
  modified_base 11: mod_base = OTHER; note = misc_feature - bicyclic nucleic acid scaffold modification
  modified_base 18: mod_base = OTHER; note = misc_feature - bicyclic nucleic acid scaffold modification
  source 1..18: mol_type = other RNA
catttctcaacagatctg

SEQ ID NO: 3045 - RNA, 18 nt, synthetic construct
  misc_feature 1..18: note = Antisense oligonucleotide
  modified_base 1: mod_base = OTHER; note = misc_feature - bicyclic nucleic acid scaffold modification
  modified_base 13: mod_base = OTHER; note = misc_feature - bicyclic nucleic acid scaffold modification
  modified_base 18: mod_base = OTHER; note = misc_feature - bicyclic nucleic acid scaffold modification
  source 1..18: mol_type = other RNA
catttctcaacagatctg

SEQ ID NO: 3046 - RNA, 18 nt, synthetic construct
  misc_feature 1..18: note = Antisense oligonucleotide
  modified_base 1: mod_base = OTHER; note = misc_feature - bicyclic nucleic acid scaffold modification
  modified_base 16: mod_base = OTHER; note = misc_feature - bicyclic nucleic acid scaffold modification
  modified_base 18: mod_base = OTHER; note = misc_feature - bicyclic nucleic acid scaffold modification
  source 1..18: mol_type = other RNA
catttctcaacagatctg

SEQ ID NO: 3047 - RNA, 18 nt, synthetic construct
  misc_feature 1..18: note = Antisense oligonucleotide
  modified_base 1: mod_base = OTHER; note = misc_feature - bicyclic nucleic acid scaffold modification
  modified_base 6: mod_base = OTHER; note = misc_feature - bicyclic nucleic acid scaffold modification
  modified_base 16: mod_base = OTHER; note = misc_feature - bicyclic nucleic acid scaffold modification
  modified_base 18: mod_base = OTHER; note = misc_feature - bicyclic nucleic acid scaffold modification
  source 1..18: mol_type = other RNA
catttctcaacagatctg

SEQ ID NO: 3048 - RNA, 18 nt, synthetic construct
  misc_feature 1..18: note = Antisense oligonucleotide
  modified_base 1: mod_base = OTHER; note = misc_feature - bicyclic nucleic acid scaffold modification
  modified_base 8: mod_base = OTHER; note = misc_feature - bicyclic nucleic acid scaffold modification
  modified_base 13: mod_base = OTHER; note = misc_feature - bicyclic nucleic acid scaffold modification
  modified_base 18: mod_base = OTHER; note = misc_feature - bicyclic nucleic acid scaffold modification
  source 1..18: mol_type = other RNA
catttctcaacagatctg

SEQ ID NO: 3049 - RNA, 18 nt, synthetic construct
  misc_feature 1..18: note = Antisense oligonucleotide
  modified_base 1: mod_base = OTHER; note = misc_feature - bicyclic nucleic acid scaffold modification
  modified_base 6: mod_base = OTHER; note = misc_feature - bicyclic nucleic acid scaffold modification
  modified_base 11: mod_base = OTHER; note = misc_feature - bicyclic nucleic acid scaffold modification
  modified_base 16: mod_base = OTHER; note = misc_feature - bicyclic nucleic acid scaffold modification
  modified_base 18: mod_base = OTHER; note = misc_feature - bicyclic nucleic acid scaffold modification
  source 1..18: mol_type = other RNA
catttctcaacagatctg

SEQ ID NO: 3050 - RNA, 18 nt, synthetic construct
  misc_feature 1..18: note = Antisense oligonucleotide
  modified_base 1: mod_base = OTHER; note = misc_feature - bicyclic nucleic acid scaffold modification
  modified_base 6: mod_base = OTHER; note = misc_feature - bicyclic nucleic acid scaffold modification
  modified_base 13: mod_base = OTHER; note = misc_feature - bicyclic nucleic acid scaffold modification
  modified_base 18: mod_base = OTHER; note = misc_feature - bicyclic nucleic acid scaffold modification
  source 1..18: mol_type = other RNA
catttctcaacagatctg

SEQ ID NO: 3051 - RNA, 18 nt, synthetic construct
  modified_base 17: mod_base = OTHER; note = thymine
  misc_feature 1..18: note = Antisense oligonucleotide
  modified_base 1..2: mod_base = OTHER; note = misc_feature - bicyclic nucleic acid scaffold modification
  modified_base 17..18: mod_base = OTHER; note = misc_feature - bicyclic nucleic acid scaffold modification
  source 1..18: mol_type = other RNA
catttctcaacagatctg

SEQ ID NO: 3052 - RNA, 18 nt, synthetic construct
  modified_base 17: mod_base = OTHER; note = thymine
  misc_feature 1..18: note = Antisense oligonucleotide
  modified_base 1..2: mod_base = OTHER; note = misc_feature - bicyclic nucleic acid scaffold modification
  modified_base 8: mod_base = OTHER; note = misc_feature - bicyclic nucleic acid scaffold modification
  modified_base 17..18: mod_base = OTHER; note = misc_feature - bicyclic nucleic acid scaffold modification
  source 1..18: mol_type = other RNA
catttctcaacagatctg

SEQ ID NO: 3053 - RNA, 18 nt, synthetic construct
  modified_base 18: mod_base = OTHER; note = thymine
  misc_feature 1..18: note = Antisense oligonucleotide
  modified_base 1: mod_base = OTHER; note = misc_feature - bicyclic nucleic acid scaffold modification
  modified_base 18: mod_base = OTHER; note = misc_feature - bicyclic nucleic acid scaffold modification
  source 1..18: mol_type = other RNA
atttctcaacagatctgt

SEQ ID NO: 3054 - RNA, 18 nt, synthetic construct
  modified_base 18: mod_base = OTHER; note = thymine
  misc_feature 1..18: note = Antisense oligonucleotide
  modified_base 1: mod_base = OTHER; note = misc_feature - bicyclic nucleic acid scaffold modification
  modified_base 5: mod_base = OTHER; note = misc_feature - bicyclic nucleic acid scaffold modification
  modified_base 18: mod_base = OTHER; note = misc_feature - bicyclic nucleic acid scaffold modification
  source 1..18: mol_type = other RNA
atttctcaacagatctgt

SEQ ID NO: 3055 - RNA, 18 nt, synthetic construct
  modified_base 18: mod_base = OTHER; note = thymine
  misc_feature 1..18: note = Antisense oligonucleotide
  modified_base 1: mod_base = OTHER; note = misc_feature - bicyclic nucleic acid scaffold modification
  modified_base 7: mod_base = OTHER; note = misc_feature - bicyclic nucleic acid scaffold modification
  modified_base 18: mod_base = OTHER; note = misc_feature - bicyclic nucleic acid scaffold modification
  source 1..18: mol_type = other RNA
atttctcaacagatctgt

SEQ ID NO: 3056 - RNA, 18 nt, synthetic construct
  modified_base 18: mod_base = OTHER; note = thymine
  misc_feature 1..18: note = Antisense oligonucleotide
  modified_base 1: mod_base = OTHER; note = misc_feature - bicyclic nucleic acid scaffold modification
  modified_base 10: mod_base = OTHER; note = misc_feature - bicyclic nucleic acid scaffold modification
  modified_base 18: mod_base = OTHER; note = misc_feature - bicyclic nucleic acid scaffold modification
  source 1..18: mol_type = other RNA
atttctcaacagatctgt

SEQ ID NO: 3057 - RNA, 18 nt, synthetic construct
  modified_base 18: mod_base = OTHER; note = thymine
  misc_feature 1..18: note = Antisense oligonucleotide
  modified_base 1: mod_base = OTHER; note = misc_feature - bicyclic nucleic acid scaffold modification
  modified_base 12: mod_base = OTHER; note = misc_feature - bicyclic nucleic acid scaffold modification
  modified_base 18: mod_base = OTHER; note = misc_feature - bicyclic nucleic acid scaffold modification
  source 1..18: mol_type = other RNA
atttctcaacagatctgt

SEQ ID NO: 3058 - RNA, 18 nt, synthetic construct
  modified_base 18: mod_base = OTHER; note = thymine
  misc_feature 1..18: note = Antisense oligonucleotide
  modified_base 1: mod_base = OTHER; note = misc_feature - bicyclic nucleic acid scaffold modification
  modified_base 15: mod_base = OTHER; note = misc_feature - bicyclic nucleic acid scaffold modification
  modified_base 18: mod_base = OTHER; note = misc_feature - bicyclic nucleic acid scaffold modification
  source 1..18: mol_type = other RNA
atttctcaacagatctgt

SEQ ID NO: 3059 - RNA, 18 nt, synthetic construct
  modified_base 18: mod_base = OTHER; note = thymine
  misc_feature 1..18: note = Antisense oligonucleotide
  modified_base 1: mod_base = OTHER; note = misc_feature - bicyclic nucleic acid scaffold modification
  modified_base 17..18: mod_base = OTHER; note = misc_feature - bicyclic nucleic acid scaffold modification
  source 1..18: mol_type = other RNA
atttctcaacagatctgt

SEQ ID NO: 3060 - RNA, 18 nt, synthetic construct
  modified_base 18: mod_base = OTHER; note = thymine
  misc_feature 1..18: note = Antisense oligonucleotide
  modified_base 1: mod_base = OTHER; note = misc_feature - bicyclic nucleic acid scaffold modification
  modified_base 5: mod_base = OTHER; note = misc_feature - bicyclic nucleic acid scaffold modification
  modified_base 12: mod_base = OTHER; note = misc_feature - bicyclic nucleic acid scaffold modification
  modified_base 18: mod_base = OTHER; note = misc_feature - bicyclic nucleic acid scaffold modification
  source 1..18: mol_type = other RNA
atttctcaacagatctgt

SEQ ID NO: 3061 - RNA, 18 nt, synthetic construct
  modified_base 18: mod_base = OTHER; note = thymine
  misc_feature 1..18: note = Antisense oligonucleotide
  modified_base 1: mod_base = OTHER; note = misc_feature - bicyclic nucleic acid scaffold modification
  modified_base 5: mod_base = OTHER; note = misc_feature - bicyclic nucleic acid scaffold modification
  modified_base 10: mod_base = OTHER; note = misc_feature - bicyclic nucleic acid scaffold modification
  modified_base 15: mod_base = OTHER; note = misc_feature - bicyclic nucleic acid scaffold modification
  modified_base 18: mod_base = OTHER; note = misc_feature - bicyclic nucleic acid scaffold modification
  source 1..18: mol_type = other RNA
atttctcaacagatctgt

SEQ ID NO: 3062 - RNA, 18 nt, synthetic construct
  modified_base 18: mod_base = OTHER; note = thymine
  misc_feature 1..18: note = Antisense oligonucleotide
  modified_base 1: mod_base = OTHER; note = misc_feature - bicyclic nucleic acid scaffold modification
  modified_base 5: mod_base = OTHER; note = misc_feature - bicyclic nucleic acid scaffold modification
  modified_base 7: mod_base = OTHER; note = misc_feature - bicyclic nucleic acid scaffold modification
  modified_base 10: mod_base = OTHER; note = misc_feature - bicyclic nucleic acid scaffold modification
  modified_base 18: mod_base = OTHER; note = misc_feature - bicyclic nucleic acid scaffold modification
  source 1..18: mol_type = other RNA
atttctcaacagatctgt

SEQ ID NO: 3063 - RNA, 18 nt, synthetic construct
  modified_base 2: mod_base = OTHER; note = thymine
  modified_base 18: mod_base = OTHER; note = thymine
  misc_feature 1..18: note = Antisense oligonucleotide
  modified_base 1..2: mod_base = OTHER; note = misc_feature - bicyclic nucleic acid scaffold modification
  modified_base 17..18: mod_base = OTHER; note = misc_feature - bicyclic nucleic acid scaffold modification
  source 1..18: mol_type = other RNA
atttctcaacagatctgt

SEQ ID NO: 3064 - RNA, 18 nt, synthetic construct
  modified_base 2: mod_base = OTHER; note = thymine
  modified_base 18: mod_base = OTHER; note = thymine
  misc_feature 1..18: note = Antisense oligonucleotide
  modified_base 1..2: mod_base = OTHER; note = misc_feature - bicyclic nucleic acid scaffold modification
  modified_base 12: mod_base = OTHER; note = misc_feature - bicyclic nucleic acid scaffold modification
  modified_base 17..18: mod_base = OTHER; note = misc_feature - bicyclic nucleic acid scaffold modification
  source 1..18: mol_type = other RNA
atttctcaacagatctgt

SEQ ID NO: 3065 - RNA, 18 nt, synthetic construct
  modified_base 1: mod_base = OTHER; note = thymine
  misc_feature 1..18: note = Antisense oligonucleotide
  modified_base 1: mod_base = OTHER; note = misc_feature - bicyclic nucleic acid scaffold modification
  modified_base 18: mod_base = OTHER; note = misc_feature - bicyclic nucleic acid scaffold modification
  source 1..18: mol_type = other RNA
tttctcaacagatctgtc

SEQ ID NO: 3066 - RNA, 18 nt, synthetic construct
  modified_base 1: mod_base = OTHER; note = thymine
  misc_feature 1..18: note = Antisense oligonucleotide
  modified_base 1: mod_base = OTHER; note = misc_feature - bicyclic nucleic acid scaffold modification
  modified_base 4: mod_base = OTHER; note = misc_feature - bicyclic nucleic acid scaffold modification
  modified_base 18: mod_base = OTHER; note = misc_feature - bicyclic nucleic acid scaffold modification
  source 1..18: mol_type = other RNA
tttctcaacagatctgtc

SEQ ID NO: 3067 - RNA, 18 nt, synthetic construct
  modified_base 1: mod_base = OTHER; note = thymine
  misc_feature 1..18: note = Antisense oligonucleotide
  modified_base 1: mod_base = OTHER; note = misc_feature - bicyclic nucleic acid scaffold modification
  modified_base 6: mod_base = OTHER; note = misc_feature - bicyclic nucleic acid scaffold modification
  modified_base 18: mod_base = OTHER; note = misc_feature - bicyclic nucleic acid scaffold modification
  source 1..18: mol_type = other RNA
tttctcaacagatctgtc

SEQ ID NO: 3068 - RNA, 18 nt, synthetic construct
  modified_base 1: mod_base = OTHER; note = thymine
  misc_feature 1..18: note = Antisense oligonucleotide
  modified_base 1: mod_base = OTHER; note = misc_feature - bicyclic nucleic acid scaffold modification
  modified_base 9: mod_base = OTHER; note = misc_feature - bicyclic nucleic acid scaffold modification
  modified_base 18: mod_base = OTHER; note = misc_feature - bicyclic nucleic acid scaffold modification
  source 1..18: mol_type = other RNA
tttctcaacagatctgtc

SEQ ID NO: 3069 - RNA, 18 nt, synthetic construct
  modified_base 1: mod_base = OTHER; note = thymine
  misc_feature 1..18: note = Antisense oligonucleotide
  modified_base 1: mod_base = OTHER; note = misc_feature - bicyclic nucleic acid scaffold modification
  modified_base 11: mod_base = OTHER; note = misc_feature - bicyclic nucleic acid scaffold modification
  modified_base 18: mod_base = OTHER; note = misc_feature - bicyclic nucleic acid scaffold modification
  source 1..18: mol_type = other RNA
tttctcaacagatctgtc

SEQ ID NO: 3070 - RNA, 18 nt, synthetic construct
  modified_base 1: mod_base = OTHER; note = thymine
  misc_feature 1..18: note = Antisense oligonucleotide
  modified_base 1: mod_base = OTHER; note = misc_feature - bicyclic nucleic acid scaffold modification
  modified_base 14: mod_base = OTHER; note = misc_feature - bicyclic nucleic acid scaffold modification
  modified_base 18: mod_base = OTHER; note = misc_feature - bicyclic nucleic acid scaffold modification
  source 1..18: mol_type = other RNA
tttctcaacagatctgtc

SEQ ID NO: 3071 - RNA, 18 nt, synthetic construct
  modified_base 1: mod_base = OTHER; note = thymine
  misc_feature 1..18: note = Antisense oligonucleotide
  modified_base 1: mod_base = OTHER; note = misc_feature - bicyclic nucleic acid scaffold modification
  modified_base 16: mod_base = OTHER; note = misc_feature - bicyclic nucleic acid scaffold modification
  modified_base 18: mod_base = OTHER; note = misc_feature - bicyclic nucleic acid scaffold modification
  source 1..18: mol_type = other RNA
tttctcaacagatctgtc

SEQ ID NO: 3072 - RNA, 18 nt, synthetic construct
  modified_base 1: mod_base = OTHER; note = thymine
  misc_feature 1..18: note = Antisense oligonucleotide
  modified_base 1: mod_base = OTHER; note = misc_feature - bicyclic nucleic acid scaffold modification
  modified_base 6: mod_base = OTHER; note = misc_feature - bicyclic nucleic acid scaffold modification
  modified_base 11: mod_base = OTHER; note = misc_feature - bicyclic nucleic acid scaffold modification
  modified_base 18: mod_base = OTHER; note = misc_feature - bicyclic nucleic acid scaffold modification
  source 1..18: mol_type = other RNA
tttctcaacagatctgtc

SEQ ID NO: 3073 - RNA, 18 nt, synthetic construct
  modified_base 1: mod_base = OTHER; note = thymine
  misc_feature 1..18: note = Antisense oligonucleotide
  modified_base 1: mod_base = OTHER; note = misc_feature - bicyclic nucleic acid scaffold modification
  modified_base 9: mod_base = OTHER; note = misc_feature - bicyclic nucleic acid scaffold modification
  modified_base 14: mod_base = OTHER; note = misc_feature - bicyclic nucleic acid scaffold modification
  modified_base 18: mod_base = OTHER; note = misc_feature - bicyclic nucleic acid scaffold modification
  source 1..18: mol_type = other RNA
tttctcaacagatctgtc

SEQ ID NO: 3074 - RNA, 18 nt, synthetic construct
  modified_base 1: mod_base = OTHER; note = thymine
  misc_feature 1..18: note = Antisense oligonucleotide
  modified_base 1: mod_base = OTHER; note = misc_feature - bicyclic nucleic acid scaffold modification
  modified_base 11: mod_base = OTHER; note = misc_feature - bicyclic nucleic acid scaffold modification
  modified_base 16: mod_base = OTHER; note = misc_feature - bicyclic nucleic acid scaffold modification
  modified_base 18: mod_base = OTHER; note = misc_feature - bicyclic nucleic acid scaffold modification
  source 1..18: mol_type = other RNA
tttctcaacagatctgtc

SEQ ID NO: 3075 - RNA, 18 nt, synthetic construct
  modified_base 1..2: mod_base = OTHER; note = thymine
  modified_base 17: mod_base = OTHER; note = thymine
  misc_feature 1..18: note = Antisense oligonucleotide
  modified_base 1..2: mod_base = OTHER; note = misc_feature - bicyclic nucleic acid scaffold modification
  modified_base 17..18: mod_base = OTHER; note = misc_feature - bicyclic nucleic acid scaffold modification
  source 1..18: mol_type = other RNA
tttctcaacagatctgtc

SEQ ID NO: 3076 - RNA, 18 nt, synthetic construct
  modified_base 1..2: mod_base = OTHER; note = thymine
  modified_base 17: mod_base = OTHER; note = thymine
  misc_feature 1..18: note = Antisense oligonucleotide
  modified_base 1..2: mod_base = OTHER; note = misc_feature - bicyclic nucleic acid scaffold modification
  modified_base 11: mod_base = OTHER; note = misc_feature - bicyclic nucleic acid scaffold modification
  modified_base 17..18: mod_base = OTHER; note = misc_feature - bicyclic nucleic acid scaffold modification
  source 1..18: mol_type = other RNA
tttctcaacagatctgtc

SEQ ID NO: 3077 - RNA, 18 nt, synthetic construct
  modified_base 1: mod_base = OTHER; note = thymine
  misc_feature 1..18: note = Antisense oligonucleotide
  modified_base 1: mod_base = OTHER; note = misc_feature - bicyclic nucleic acid scaffold modification
  modified_base 18: mod_base = OTHER; note = misc_feature - bicyclic nucleic acid scaffold modification
  source 1..18: mol_type = other RNA
ttctcaacagatctgtca

SEQ ID NO: 3078 - RNA, 18 nt, synthetic construct
  modified_base 1: mod_base = OTHER; note = thymine
  misc_feature 1..18: note = Antisense oligonucleotide
  modified_base 1: mod_base = OTHER; note = misc_feature - bicyclic nucleic acid scaffold modification
  modified_base 3: mod_base = OTHER; note = misc_feature - bicyclic nucleic acid scaffold modification
  modified_base 18: mod_base = OTHER; note = misc_feature - bicyclic nucleic acid scaffold modification
  source 1..18: mol_type = other RNA
ttctcaacagatctgtca

SEQ ID NO: 3079 - RNA, 18 nt, synthetic construct
  modified_base 1: mod_base = OTHER; note = thymine
  misc_feature 1..18: note = Antisense oligonucleotide
  modified_base 1: mod_base = OTHER; note = misc_feature - bicyclic nucleic acid scaffold modification
  modified_base 5: mod_base = OTHER; note = misc_feature - bicyclic nucleic acid scaffold modification
  modified_base 18: mod_base = OTHER; note = misc_feature - bicyclic nucleic acid scaffold modification
  source 1..18: mol_type = other RNA
ttctcaacagatctgtca

SEQ ID NO: 3080 - RNA, 18 nt, synthetic construct
  modified_base 1: mod_base = OTHER; note = thymine
  misc_feature 1..18: note = Antisense oligonucleotide
  modified_base 1: mod_base = OTHER; note = misc_feature - bicyclic nucleic acid scaffold modification
  modified_base 8: mod_base = OTHER; note = misc_feature - bicyclic nucleic acid scaffold modification
  modified_base 18: mod_base = OTHER; note = misc_feature - bicyclic nucleic acid scaffold modification
  source 1..18: mol_type = other RNA
ttctcaacagatctgtca

SEQ ID NO: 3081 - RNA, 18 nt, synthetic construct
  modified_base 1: mod_base = OTHER; note = thymine
  misc_feature 1..18: note = Antisense oligonucleotide
  modified_base 1: mod_base = OTHER; note = misc_feature - bicyclic nucleic acid scaffold modification
  modified_base 10: mod_base = OTHER; note = misc_feature - bicyclic nucleic acid scaffold modification
  modified_base 18: mod_base = OTHER; note = misc_feature - bicyclic nucleic acid scaffold modification
  source 1..18: mol_type = other RNA
ttctcaacagatctgtca

SEQ ID NO: 3082 - RNA, 18 nt, synthetic construct
  modified_base 1: mod_base = OTHER; note = thymine
  misc_feature 1..18: note = Antisense oligonucleotide
  modified_base 1: mod_base = OTHER; note = misc_feature - bicyclic nucleic acid scaffold modification
  modified_base 13: mod_base = OTHER; note = misc_feature - bicyclic nucleic acid scaffold modification
  modified_base 18: mod_base = OTHER; note = misc_feature - bicyclic nucleic acid scaffold modification
  source 1..18: mol_type = other RNA
ttctcaacagatctgtca

SEQ ID NO: 3083 - RNA, 18 nt, synthetic construct
  modified_base 1: mod_base = OTHER; note = thymine
  misc_feature 1..18: note = Antisense oligonucleotide
  modified_base 1: mod_base = OTHER; note = misc_feature - bicyclic nucleic acid scaffold modification
  modified_base 15: mod_base = OTHER; note = misc_feature - bicyclic nucleic acid scaffold modification
  modified_base 18: mod_base = OTHER; note = misc_feature - bicyclic nucleic acid scaffold modification
  source 1..18: mol_type = other RNA
ttctcaacagatctgtca

SEQ ID NO: 3084 - RNA, 18 nt, synthetic construct
  modified_base 1: mod_base = OTHER; note = thymine
  misc_feature 1..18: note = Antisense oligonucleotide
  modified_base 1: mod_base = OTHER; note = misc_feature - bicyclic nucleic acid scaffold modification
  modified_base 5: mod_base = OTHER; note = misc_feature - bicyclic nucleic acid scaffold modification
  modified_base 13: mod_base = OTHER; note = misc_feature - bicyclic nucleic acid scaffold modification
  modified_base 18: mod_base = OTHER; note = misc_feature - bicyclic nucleic acid scaffold modification
  source 1..18: mol_type = other RNA
ttctcaacagatctgtca

SEQ ID NO: 3085 - RNA, 18 nt, synthetic construct
  modified_base 1: mod_base = OTHER; note = thymine
  misc_feature 1..18: note = Antisense oligonucleotide
  modified_base 1: mod_base = OTHER; note = misc_feature - bicyclic nucleic acid scaffold modification
  modified_base 8: mod_base = OTHER; note = misc_feature - bicyclic nucleic acid scaffold modification
  modified_base 15: mod_base = OTHER; note = misc_feature - bicyclic nucleic acid scaffold modification
  modified_base 18: mod_base = OTHER; note = misc_feature - bicyclic nucleic acid scaffold modification
  source 1..18: mol_type = other RNA
ttctcaacagatctgtca

SEQ ID NO: 3086 - RNA, 18 nt, synthetic construct
  modified_base 1: mod_base = OTHER; note = thymine
  misc_feature 1..18: note = Antisense oligonucleotide
  modified_base 1: mod_base = OTHER; note = misc_feature - bicyclic nucleic acid scaffold modification
  modified_base 10: mod_base = OTHER; note = misc_feature - bicyclic nucleic acid scaffold modification
  modified_base 15: mod_base = OTHER; note = misc_feature - bicyclic nucleic acid scaffold modification
  modified_base 18: mod_base = OTHER; note = misc_feature - bicyclic nucleic acid scaffold modification
  source 1..18: mol_type = other RNA
ttctcaacagatctgtca

SEQ ID NO: 3087 - RNA, 18 nt, synthetic construct
  modified_base 1..2: mod_base = OTHER; note = thymine
  misc_feature 1..18: note = Antisense oligonucleotide
  modified_base 1..2: mod_base = OTHER; note = misc_feature - bicyclic nucleic acid scaffold modification
  modified_base 17..18: mod_base = OTHER; note = misc_feature - bicyclic nucleic acid scaffold modification
  source 1..18: mol_type = other RNA
ttctcaacagatctgtca

SEQ ID NO: 3088 - RNA, 18 nt, synthetic construct
  modified_base 1..2: mod_base = OTHER; note = thymine
  misc_feature 1..18: note = Antisense oligonucleotide
  modified_base 1..2: mod_base = OTHER; note = misc_feature - bicyclic nucleic acid scaffold modification
  modified_base 10: mod_base = OTHER; note = misc_feature - bicyclic nucleic acid scaffold modification
  modified_base 17..18: mod_base = OTHER; note = misc_feature - bicyclic nucleic acid scaffold modification
  source 1..18: mol_type = other RNA
ttctcaacagatctgtca

SEQ ID NO: 3089 - RNA, 18 nt, synthetic construct
  modified_base 1..2: mod_base = OTHER; note = thymine
  misc_feature 1..18: note = Antisense oligonucleotide
  modified_base 1..2: mod_base = OTHER; note = misc_feature - bicyclic nucleic acid scaffold modification
  modified_base 8: mod_base = OTHER; note = misc_feature - bicyclic nucleic acid scaffold modification
  modified_base 17..18: mod_base = OTHER; note = misc_feature - bicyclic nucleic acid scaffold modification
  source 1..18: mol_type = other RNA
ttctcaacagatctgtca

SEQ ID NO: 3090 - RNA, 16 nt, synthetic construct
  misc_feature 1..16: note = Antisense oligonucleotide
  modified_base 1: mod_base = OTHER; note = misc_feature - bicyclic nucleic acid scaffold modification
  modified_base 16: mod_base = OTHER; note = misc_feature - bicyclic nucleic acid scaffold modification
  source 1..16: mol_type = other RNA
gccatttctcaacaga

SEQ ID NO: 3091 - RNA, 16 nt, synthetic construct
  misc_feature 1..16: note = Antisense oligonucleotide
  modified_base 1: mod_base = OTHER; note = misc_feature - bicyclic nucleic acid scaffold modification
  modified_base 3: mod_base = OTHER; note = misc_feature - bicyclic nucleic acid scaffold modification
  modified_base 16: mod_base = OTHER; note = misc_feature - bicyclic nucleic acid scaffold modification
  source 1..16: mol_type = other RNA
gccatttctcaacaga

SEQ ID NO: 3092 - RNA, 16 nt, synthetic construct
  misc_feature 1..16: note = Antisense oligonucleotide
  modified_base 1: mod_base = OTHER; note = misc_feature - bicyclic nucleic acid scaffold modification
  modified_base 8: mod_base = OTHER; note = misc_feature - bicyclic nucleic acid scaffold modification
  modified_base 16: mod_base = OTHER; note = misc_feature - bicyclic nucleic acid scaffold modification
  source 1..16: mol_type = other RNA
gccatttctcaacaga

SEQ ID NO: 3093 - RNA, 16 nt, synthetic construct
  misc_feature 1..16: note = Antisense oligonucleotide
  modified_base 1: mod_base = OTHER; note = misc_feature - bicyclic nucleic acid scaffold modification
  modified_base 10: mod_base = OTHER; note = misc_feature - bicyclic nucleic acid scaffold modification
  modified_base 16: mod_base = OTHER; note = misc_feature - bicyclic nucleic acid scaffold modification
  source 1..16: mol_type = other RNA
gccatttctcaacaga

SEQ ID NO: 3094 - RNA, 16 nt, synthetic construct
  misc_feature 1..16: note = Antisense oligonucleotide
  modified_base 1: mod_base = OTHER; note = misc_feature - bicyclic nucleic acid scaffold modification
  modified_base 13: mod_base = OTHER; note = misc_feature - bicyclic nucleic acid scaffold modification
  modified_base 16: mod_base = OTHER; note = misc_feature - bicyclic nucleic acid scaffold modification
  source 1..16: mol_type = other RNA
gccatttctcaacaga

SEQ ID NO: 3095 - RNA, 16 nt, synthetic construct
  misc_feature 1..16: note = Antisense oligonucleotide
  modified_base 1: mod_base = OTHER; note = misc_feature - bicyclic nucleic acid scaffold modification
  modified_base 3: mod_base = OTHER; note = misc_feature - bicyclic nucleic acid scaffold modification
  modified_base 8: mod_base = OTHER; note = misc_feature - bicyclic nucleic acid scaffold modification
  modified_base 16: mod_base = OTHER; note = misc_feature - bicyclic nucleic acid scaffold modification
  source 1..16: mol_type = other RNA
gccatttctcaacaga

SEQ ID NO: 3096 - RNA, 16 nt, synthetic construct
  misc_feature 1..16: note = Antisense oligonucleotide
  modified_base 1: mod_base = OTHER; note = misc_feature - bicyclic nucleic acid scaffold modification
  modified_base 8: mod_base = OTHER; note = misc_feature - bicyclic nucleic acid scaffold modification
  modified_base 13: mod_base = OTHER; note = misc_feature - bicyclic nucleic acid scaffold modification
  modified_base 16: mod_base = OTHER; note = misc_feature - bicyclic nucleic acid scaffold modification
  source 1..16: mol_type = other RNA
gccatttctcaacaga

SEQ ID NO: 3097 - RNA, 16 nt, synthetic construct
  misc_feature 1..16: note = Antisense oligonucleotide
  modified_base 1: mod_base = OTHER; note = misc_feature - bicyclic nucleic acid scaffold modification
  modified_base 10: mod_base = OTHER; note = misc_feature - bicyclic nucleic acid scaffold modification
  modified_base 15..16: mod_base = OTHER; note = misc_feature - bicyclic nucleic acid scaffold modification
  source 1..16: mol_type = other RNA
gccatttctcaacaga

SEQ ID NO: 3098 - RNA, 16 nt, synthetic construct
  misc_feature 1..16: note = Antisense oligonucleotide
  modified_base 1: mod_base = OTHER; note = misc_feature - bicyclic nucleic acid scaffold modification
  modified_base 3: mod_base = OTHER; note = misc_feature - bicyclic nucleic acid scaffold modification
  modified_base 8: mod_base = OTHER; note = misc_feature - bicyclic nucleic acid scaffold modification
  modified_base 13: mod_base = OTHER; note = misc_feature - bicyclic nucleic acid scaffold modification
  modified_base 16: mod_base = OTHER; note = misc_feature - bicyclic nucleic acid scaffold modification
  source 1..16: mol_type = other RNA
gccatttctcaacaga

SEQ ID NO: 3099 - RNA, 16 nt, synthetic construct
  misc_feature 1..16: note = Antisense oligonucleotide
  modified_base 1: mod_base = OTHER; note = misc_feature - bicyclic nucleic acid scaffold modification
  modified_base 16: mod_base = OTHER; note = misc_feature - bicyclic nucleic acid scaffold modification
  source 1..16: mol_type = other RNA
gccatttctcaacaga

SEQ ID NO: 3100 - RNA, 16 nt, synthetic construct
  misc_feature 1..16: note = Antisense oligonucleotide
  modified_base 1..2: mod_base = OTHER; note = misc_feature - bicyclic nucleic acid scaffold modification
  modified_base 15..16: mod_base = OTHER; note = misc_feature - bicyclic nucleic acid scaffold modification
  source 1..16: mol_type = other RNA
gccatttctcaacaga

SEQ ID NO: 3101 - RNA, 16 nt, synthetic construct
  misc_feature 1..16: note = Antisense oligonucleotide
  modified_base 1..2: mod_base = OTHER; note = misc_feature - bicyclic nucleic acid scaffold modification
  modified_base 8: mod_base = OTHER; note = misc_feature - bicyclic nucleic acid scaffold modification
  modified_base 15..16: mod_base = OTHER; note = misc_feature - bicyclic nucleic acid scaffold modification
  source 1..16: mol_type = other RNA
gccatttctcaacaga

SEQ ID NO: 3102 - RNA, 16 nt, synthetic construct
  modified_base 16: mod_base = OTHER; note = thymine
  misc_feature 1..16: note = Antisense oligonucleotide
  modified_base 1: mod_base = OTHER; note = misc_feature - bicyclic nucleic acid scaffold modification
  modified_base 16: mod_base = OTHER; note = misc_feature - bicyclic nucleic acid scaffold modification
  source 1..16: mol_type = other RNA
ccatttctcaacagat

SEQ ID NO: 3103 - RNA, 16 nt, synthetic construct
  modified_base 16: mod_base = OTHER; note = thymine
  misc_feature 1..16: note = Antisense oligonucleotide
  modified_base 1: mod_base = OTHER; note = misc_feature - bicyclic nucleic acid scaffold modification
  modified_base 7: mod_base = OTHER; note = misc_feature - bicyclic nucleic acid scaffold modification
  modified_base 16: mod_base = OTHER; note = misc_feature - bicyclic nucleic acid scaffold modification
  source 1..16: mol_type = other RNA
ccatttctcaacagat

SEQ ID NO: 3104 - RNA, 16 nt, synthetic construct
  modified_base 16: mod_base = OTHER; note = thymine
  misc_feature 1..16: note = Antisense oligonucleotide
  modified_base 1: mod_base = OTHER; note = misc_feature - bicyclic nucleic acid scaffold modification
  modified_base 9: mod_base = OTHER; note = misc_feature - bicyclic nucleic acid scaffold modification
  modified_base 16: mod_base = OTHER; note = misc_feature - bicyclic nucleic acid scaffold modification
  source 1..16: mol_type = other RNA
ccatttctcaacagat

SEQ ID NO: 3105 - RNA, 16 nt, synthetic construct
  modified_base 16: mod_base = OTHER; note = thymine
  misc_feature 1..16: note = Antisense oligonucleotide
  modified_base 1: mod_base = OTHER; note = misc_feature - bicyclic nucleic acid scaffold modification
  modified_base 12: mod_base = OTHER; note = misc_feature - bicyclic nucleic acid scaffold modification
  modified_base 16: mod_base = OTHER; note = misc_feature - bicyclic nucleic acid scaffold modification
  source 1..16: mol_type = other RNA
ccatttctcaacagat

SEQ ID NO: 3106 - RNA, 16 nt, synthetic construct
  modified_base 16: mod_base = OTHER; note = thymine
  misc_feature 1..16: note = Antisense oligonucleotide
  modified_base 1: mod_base = OTHER; note = misc_feature - bicyclic nucleic acid scaffold modification
  modified_base 14: mod_base = OTHER; note = misc_feature - bicyclic nucleic acid scaffold modification
  modified_base 16: mod_base = OTHER; note = misc_feature - bicyclic nucleic acid scaffold modification
  source 1..16: mol_type = other RNA
ccatttctcaacagat

SEQ ID NO: 3107 - RNA, 16 nt, synthetic construct
  modified_base 16: mod_base = OTHER; note = thymine
  misc_feature 1..16: note = Antisense oligonucleotide
  modified_base 1: mod_base = OTHER; note = misc_feature - bicyclic nucleic acid scaffold modification
  modified_base 16: mod_base = OTHER; note = misc_feature - bicyclic nucleic acid scaffold modification
  source 1..16: mol_type = other RNA
ccatttctcaacagat

SEQ ID NO: 3108 - RNA, 16 nt, synthetic construct
  modified_base 16: mod_base = OTHER; note = thymine
  misc_feature 1..16: note = Antisense oligonucleotide
  modified_base 1: mod_base = OTHER; note = misc_feature - bicyclic nucleic acid scaffold modification
  modified_base 9: mod_base = OTHER; note = misc_feature - bicyclic nucleic acid scaffold modification
  modified_base 14: mod_base = OTHER; note = misc_feature - bicyclic nucleic acid scaffold modification
  modified_base 16: mod_base = OTHER; note = misc_feature - bicyclic nucleic acid scaffold modification
  source 1..16: mol_type = other RNA
ccatttctcaacagat

SEQ ID NO: 3109 - RNA, 16 nt, synthetic construct
  modified_base 16: mod_base = OTHER; note = thymine
  misc_feature 1..16: note = Antisense oligonucleotide
  modified_base 1: mod_base = OTHER; note = misc_feature - bicyclic nucleic acid scaffold modification
  modified_base 7: mod_base = OTHER; note = misc_feature - bicyclic nucleic acid scaffold modification
  modified_base 14: mod_base = OTHER; note = misc_feature - bicyclic nucleic acid scaffold modification
  modified_base 16: mod_base = OTHER; note = misc_feature - bicyclic nucleic acid scaffold modification
  source 1..16: mol_type = other RNA
ccatttctcaacagat

SEQ ID NO: 3110 - RNA, 16 nt, synthetic construct
  modified_base 16: mod_base = OTHER; note = thymine
  misc_feature 1..16: note = Antisense oligonucleotide
  modified_base 1: mod_base = OTHER; note = misc_feature - bicyclic nucleic acid scaffold modification
  modified_base 7: mod_base = OTHER; note = misc_feature - bicyclic nucleic acid scaffold modification
  modified_base 12: mod_base = OTHER; note = misc_feature - bicyclic nucleic acid scaffold modification
  modified_base 16: mod_base = OTHER; note = misc_feature - bicyclic nucleic acid scaffold modification
  source 1..16: mol_type = other RNA
ccatttctcaacagat

SEQ ID NO: 3111 - RNA, 16 nt, synthetic construct
  modified_base 16: mod_base = OTHER; note = thymine
  misc_feature 1..16: note = Antisense oligonucleotide
  modified_base 1..2: mod_base = OTHER; note = misc_feature - bicyclic nucleic acid scaffold modification
  modified_base 15..16: mod_base = OTHER; note = misc_feature - bicyclic nucleic acid scaffold modification
  source 1..16: mol_type = other RNA
ccatttctcaacagat

SEQ ID NO: 3112 - RNA, 16 nt, synthetic construct
  modified_base 16: mod_base = OTHER; note = thymine
  misc_feature 1..16: note = Antisense oligonucleotide
  modified_base 1: mod_base = OTHER; note = misc_feature - bicyclic nucleic acid scaffold modification
  modified_base 7: mod_base = OTHER; note = misc_feature - bicyclic nucleic acid scaffold modification
  modified_base 12: mod_base = OTHER; note = misc_feature - bicyclic nucleic acid scaffold modification
  modified_base 15..16: mod_base = OTHER; note = misc_feature - bicyclic nucleic acid scaffold modification
  source 1..16: mol_type = other RNA
ccatttctcaacagat

SEQ ID NO: 3113 - RNA, 16 nt, synthetic construct
  misc_feature 1..16: note = Antisense oligonucleotide
  modified_base 1: mod_base = OTHER; note = misc_feature - bicyclic nucleic acid scaffold modification
  modified_base 16: mod_base = OTHER; note = misc_feature - bicyclic nucleic acid scaffold modification
  source 1..16: mol_type = other RNA
catttctcaacagatc

SEQ ID NO: 3114 - RNA, 16 nt, synthetic construct
  misc_feature 1..16: note = Antisense oligonucleotide
  modified_base 1: mod_base = OTHER; note = misc_feature - bicyclic nucleic acid scaffold modification
  modified_base 13: mod_base = OTHER; note = misc_feature - bicyclic nucleic acid scaffold modification
  modified_base 16: mod_base = OTHER; note = misc_feature - bicyclic nucleic acid scaffold modification
  source 1..16: mol_type = other RNA
catttctcaacagatc

SEQ ID NO: 3115 - RNA, 16 nt, synthetic construct
  misc_feature 1..16: note = Antisense oligonucleotide
  modified_base 1: mod_base = OTHER; note = misc_feature - bicyclic nucleic acid scaffold modification
  modified_base 11: mod_base = OTHER; note = misc_feature - bicyclic nucleic acid scaffold modification
  modified_base 16: mod_base = OTHER; note = misc_feature - bicyclic nucleic acid scaffold modification
  source 1..16: mol_type = other RNA
catttctcaacagatc

SEQ ID NO: 3116 - RNA, 16 nt, synthetic construct
  misc_feature 1..16: note = Antisense oligonucleotide
  modified_base 1: mod_base = OTHER; note = misc_feature - bicyclic nucleic acid scaffold modification
  modified_base 8: mod_base = OTHER; note = misc_feature - bicyclic nucleic acid scaffold modification
  modified_base 16: mod_base = OTHER; note = misc_feature - bicyclic nucleic acid scaffold modification
  source 1..16: mol_type = other RNA
catttctcaacagatc

SEQ ID NO: 3117 - RNA, 16 nt, synthetic construct
  misc_feature 1..16: note = Antisense oligonucleotide
  modified_base 1: mod_base = OTHER; note = misc_feature - bicyclic nucleic acid scaffold modification
  modified_base 6: mod_base = OTHER; note = misc_feature - bicyclic nucleic acid scaffold modification
  modified_base 16: mod_base = OTHER; note = misc_feature - bicyclic nucleic acid scaffold modification
  source 1..16: mol_type = other RNA
catttctcaacagatc

SEQ ID NO: 3118 - RNA, 16 nt, synthetic construct
  misc_feature 1..16: note = Antisense oligonucleotide
  modified_base 1: mod_base = OTHER; note = misc_feature - bicyclic nucleic acid scaffold modification
  modified_base 6: mod_base = OTHER; note = misc_feature - bicyclic nucleic acid scaffold modification
  modified_base 13: mod_base = OTHER; note = misc_feature - bicyclic nucleic acid scaffold modification
  modified_base 16: mod_base = OTHER; note = misc_feature - bicyclic nucleic acid scaffold modification
  source 1..16: mol_type = other RNA
catttctcaacagatc

SEQ ID NO: 3119 - RNA, 16 nt, synthetic construct
  misc_feature 1..16: note = Antisense oligonucleotide
  modified_base 1: mod_base = OTHER; note = misc_feature - bicyclic nucleic acid scaffold modification
  modified_base 8: mod_base = OTHER; note = misc_feature - bicyclic nucleic acid scaffold modification
  modified_base 13: mod_base = OTHER; note = misc_feature - bicyclic nucleic acid scaffold modification
  modified_base 16: mod_base = OTHER; note = misc_feature - bicyclic nucleic acid scaffold modification
  source 1..16: mol_type = other RNA
catttctcaacagatc

SEQ ID NO: 3120 - RNA, 16 nt, synthetic construct
  misc_feature 1..16: note = Antisense oligonucleotide
  modified_base 1: mod_base = OTHER; note = misc_feature - bicyclic nucleic acid scaffold modification
  modified_base 8: mod_base = OTHER; note = misc_feature - bicyclic nucleic acid scaffold modification
  modified_base 11: mod_base = OTHER; note = misc_feature - bicyclic nucleic acid scaffold modification
  modified_base 16: mod_base = OTHER; note = misc_feature - bicyclic nucleic acid scaffold modification
  source 1..16: mol_type = other RNA
catttctcaacagatc

SEQ ID NO: 3121 - RNA, 16 nt, synthetic construct
  misc_feature 1..16: note = Antisense oligonucleotide
  modified_base 1: mod_base = OTHER; note = misc_feature - bicyclic nucleic acid scaffold modification
  modified_base 6: mod_base = OTHER; note = misc_feature - bicyclic nucleic acid scaffold modification
  modified_base 11: mod_base = OTHER; note = misc_feature - bicyclic nucleic acid scaffold modification
  modified_base 16: mod_base = OTHER; note = misc_feature - bicyclic nucleic acid scaffold modification
  source 1..16: mol_type = other RNA
catttctcaacagatc

SEQ ID NO: 3122 - RNA, 16 nt, synthetic construct
  modified_base 15: mod_base = OTHER; note = thymine
  misc_feature 1..16: note = Antisense oligonucleotide
  modified_base 1..2: mod_base = OTHER; note = misc_feature - bicyclic nucleic acid scaffold modification
  modified_base 15..16: mod_base = OTHER; note = misc_feature - bicyclic nucleic acid scaffold modification
  source 1..16: mol_type = other RNA
catttctcaacagatc

SEQ ID NO: 3123 - RNA, 16 nt, synthetic construct
  modified_base 15: mod_base = OTHER; note = thymine
  misc_feature 1..16: note = Antisense oligonucleotide
  modified_base 1: mod_base = OTHER; note = misc_feature - bicyclic nucleic acid scaffold modification
  modified_base 6: mod_base = OTHER; note = misc_feature - bicyclic nucleic acid scaffold modification
  modified_base 11: mod_base = OTHER; note = misc_feature - bicyclic nucleic acid scaffold modification
  modified_base 15..16: mod_base = OTHER; note = misc_feature - bicyclic nucleic acid scaffold modification
  source 1..16: mol_type = other RNA
catttctcaacagatc

SEQ ID NO: 3124 - RNA, 16 nt, synthetic construct
  modified_base 16: mod_base = OTHER; note = thymine
  misc_feature 1..16: note = Antisense oligonucleotide
  modified_base 1: mod_base = OTHER; note = misc_feature - bicyclic nucleic acid scaffold modification
  modified_base 16: mod_base = OTHER; note = misc_feature - bicyclic nucleic acid scaffold modification
  source 1..16: mol_type = other RNA
atttctcaacagatct

SEQ ID NO: 3125 - RNA, 16 nt, synthetic construct
  modified_base 16: mod_base = OTHER; note = thymine
  misc_feature 1..16: note = Antisense oligonucleotide
  modified_base 1: mod_base = OTHER; note = misc_feature - bicyclic nucleic acid scaffold modification
  modified_base 5: mod_base = OTHER; note = misc_feature - bicyclic nucleic acid scaffold modification
  modified_base 16: mod_base = OTHER; note = misc_feature - bicyclic nucleic acid scaffold modification
  source 1..16: mol_type = other RNA
atttctcaacagatct

SEQ ID NO: 3126 - RNA, 16 nt, synthetic construct
  modified_base 16: mod_base = OTHER; note = thymine
  misc_feature 1..16: note = Antisense oligonucleotide
  modified_base 1: mod_base = OTHER; note = misc_feature - bicyclic nucleic acid scaffold modification
  modified_base 7: mod_base = OTHER; note = misc_feature - bicyclic nucleic acid scaffold modification
  modified_base 16: mod_base = OTHER; note = misc_feature - bicyclic nucleic acid scaffold modification
  source 1..16: mol_type = other RNA
atttctcaacagatct

SEQ ID NO: 3127 - RNA, 16 nt, synthetic construct
  modified_base 16: mod_base = OTHER; note = thymine
  misc_feature 1..16: note = Antisense oligonucleotide
  modified_base 1: mod_base = OTHER; note = misc_feature - bicyclic nucleic acid scaffold modification
  modified_base 10: mod_base = OTHER; note = misc_feature - bicyclic nucleic acid scaffold modification
  modified_base 16: mod_base = OTHER; note = misc_feature - bicyclic nucleic acid scaffold modification
  source 1..16: mol_type = other RNA
atttctcaacagatct

SEQ ID NO: 3128 - RNA, 16 nt, synthetic construct
  modified_base 16: mod_base = OTHER; note = thymine
  misc_feature 1..16: note = Antisense oligonucleotide
  modified_base 1: mod_base = OTHER; note = misc_feature - bicyclic nucleic acid scaffold modification
  modified_base 12: mod_base = OTHER; note = misc_feature - bicyclic nucleic acid scaffold modification
  modified_base 16: mod_base = OTHER; note = misc_feature - bicyclic nucleic acid scaffold modification
  source 1..16: mol_type = other RNA
atttctcaacagatct

SEQ ID NO: 3129 - RNA, 16 nt, synthetic construct
  modified_base 16: mod_base = OTHER; note = thymine
  misc_feature 1..16: note = Antisense oligonucleotide
  modified_base 1: mod_base = OTHER; note = misc_feature - bicyclic nucleic acid scaffold modification
  modified_base 5: mod_base = OTHER; note = misc_feature - bicyclic nucleic acid scaffold modification
  modified_base 12: mod_base = OTHER; note = misc_feature - bicyclic nucleic acid scaffold modification
  modified_base 16: mod_base = OTHER; note = misc_feature - bicyclic nucleic acid scaffold modification
  source 1..16: mol_type = other RNA
atttctcaacagatct

SEQ ID NO: 3130 - RNA, 16 nt, synthetic construct
  modified_base 16: mod_base = OTHER; note = thymine
  misc_feature 1..16: note = Antisense oligonucleotide
  modified_base 1: mod_base = OTHER; note = misc_feature - bicyclic nucleic acid scaffold modification
  modified_base 7: mod_base = OTHER; note = misc_feature - bicyclic nucleic acid scaffold modification
  modified_base 12: mod_base = OTHER; note = misc_feature - bicyclic nucleic acid scaffold modification
  modified_base 16: mod_base = OTHER; note = misc_feature - bicyclic nucleic acid scaffold modification
  source 1..16: mol_type = other RNA
atttctcaacagatct

SEQ ID NO: 3131 - RNA, 16 nt, synthetic construct
  modified_base 16: mod_base = OTHER; note = thymine
  misc_feature 1..16: note = Antisense oligonucleotide
  modified_base 1: mod_base = OTHER; note = misc_feature - bicyclic nucleic acid scaffold modification
  modified_base 5: mod_base = OTHER; note = misc_feature - bicyclic nucleic acid scaffold modification
  modified_base 10: mod_base = OTHER; note = misc_feature - bicyclic nucleic acid scaffold modification
  modified_base 16: mod_base = OTHER; note = misc_feature - bicyclic nucleic acid scaffold modification
  source 1..16: mol_type = other RNA
atttctcaacagatct

SEQ ID NO: 3132 - RNA, 16 nt, synthetic construct
  modified_base 16: mod_base = OTHER; note = thymine
  misc_feature 1..16: note = Antisense oligonucleotide
  modified_base 1: mod_base = OTHER; note = misc_feature - bicyclic nucleic acid scaffold modification
  modified_base 12: mod_base = OTHER; note = misc_feature - bicyclic nucleic acid scaffold modification
  modified_base 15..16: mod_base = OTHER; note = misc_feature - bicyclic nucleic acid scaffold modification
  source 1..16: mol_type = other RNA
atttctcaacagatct

SEQ ID NO: 3133 - RNA, 16 nt, synthetic construct
  modified_base 2: mod_base = OTHER; note = thymine
  modified_base 16: mod_base = OTHER; note = thymine
  misc_feature 1..16: note = Antisense oligonucleotide
  modified_base 1..2: mod_base = OTHER; note = misc_feature - bicyclic nucleic acid scaffold modification
  modified_base 15..16: mod_base = OTHER; note = misc_feature - bicyclic nucleic acid scaffold modification
  source 1..16: mol_type = other RNA
atttctcaacagatct

SEQ ID NO: 3134 - RNA, 16 nt, synthetic construct
  modified_base 16: mod_base = OTHER; note = thymine
  misc_feature 1..16: note = Antisense oligonucleotide
  modified_base 1: mod_base = OTHER; note = misc_feature - bicyclic nucleic acid scaffold modification
  modified_base 5: mod_base = OTHER; note = misc_feature - bicyclic nucleic acid scaffold modification
  modified_base 10: mod_base = OTHER; note = misc_feature - bicyclic nucleic acid scaffold modification
  modified_base 15..16: mod_base = OTHER; note = misc_feature - bicyclic nucleic acid scaffold modification
  source 1..16: mol_type = other RNA
atttctcaacagatct

SEQ ID NO: 3135 - RNA, 16 nt, synthetic construct
  modified_base 16: mod_base = OTHER; note = thymine
  misc_feature 1..16: note = Antisense oligonucleotide
  modified_base 1: mod_base = OTHER; note = misc_feature - bicyclic nucleic acid scaffold modification
  modified_base 5: mod_base = OTHER; note = misc_feature - bicyclic nucleic acid scaffold modification
  modified_base 12: mod_base = OTHER; note = misc_feature - bicyclic nucleic acid scaffold modification
  modified_base 15..16: mod_base = OTHER; note = misc_feature - bicyclic nucleic acid scaffold modification
  source 1..16: mol_type = other RNA
atttctcaacagatct

SEQ ID NO: 3136 - RNA, 16 nt, synthetic construct
  modified_base 1: mod_base = OTHER; note = thymine
  misc_feature 1..16: note = Antisense oligonucleotide
  modified_base 1: mod_base = OTHER; note = misc_feature - bicyclic nucleic acid scaffold modification
  modified_base 16: mod_base = OTHER; note = misc_feature - bicyclic nucleic acid scaffold modification
  source 1..16: mol_type = other RNA
tttctcaacagatctg

SEQ ID NO: 3137 - RNA, 16 nt, synthetic construct
  modified_base 1: mod_base = OTHER; note = thymine
  misc_feature 1..16: note = Antisense oligonucleotide
  modified_base 1: mod_base = OTHER; note = misc_feature - bicyclic nucleic acid scaffold modification
  modified_base 14: mod_base = OTHER; note = misc_feature - bicyclic nucleic acid scaffold modification
  modified_base 16: mod_base = OTHER; note = misc_feature - bicyclic nucleic acid scaffold modification
  source 1..16: mol_type = other RNA
tttctcaacagatctg

SEQ ID NO: 3138 - RNA, 16 nt, synthetic construct
  modified_base 1: mod_base = OTHER; note = thymine
  misc_feature 1..16: note = Antisense oligonucleotide
  modified_base 1: mod_base = OTHER; note = misc_feature - bicyclic nucleic acid scaffold modification
  modified_base 11: mod_base = OTHER; note = misc_feature - bicyclic nucleic acid scaffold modification
  modified_base 16: mod_base = OTHER; note = misc_feature - bicyclic nucleic acid scaffold modification
  source 1..16: mol_type = other RNA
tttctcaacagatctg

SEQ ID NO: 3139 - RNA, 16 nt, synthetic construct
  modified_base 1: mod_base = OTHER; note = thymine
  misc_feature 1..16: note = Antisense oligonucleotide
  modified_base 1: mod_base = OTHER; note = misc_feature - bicyclic nucleic acid scaffold modification
  modified_base 9: mod_base = OTHER; note = misc_feature - bicyclic nucleic acid scaffold modification
  modified_base 16: mod_base = OTHER; note = misc_feature - bicyclic nucleic acid scaffold modification
  source 1..16: mol_type = other RNA
tttctcaacagatctg

SEQ ID NO: 3140 - RNA, 16 nt, synthetic construct
  modified_base 1: mod_base = OTHER; note = thymine
  misc_feature 1..16: note = Antisense oligonucleotide
  modified_base 1: mod_base = OTHER; note = misc_feature - bicyclic nucleic acid scaffold modification
  modified_base 6: mod_base = OTHER; note = misc_feature - bicyclic nucleic acid scaffold modification
  modified_base 16: mod_base = OTHER; note = misc_feature - bicyclic nucleic acid scaffold modification
  source 1..16: mol_type = other RNA
tttctcaacagatctg

SEQ ID NO: 3141 - RNA, 16 nt, synthetic construct
  modified_base 1: mod_base = OTHER; note = thymine
  misc_feature 1..16: note = Antisense oligonucleotide
  modified_base 1: mod_base = OTHER; note = misc_feature - bicyclic nucleic acid scaffold modification
  modified_base 4: mod_base = OTHER; note = misc_feature - bicyclic nucleic acid scaffold modification
  modified_base 16: mod_base = OTHER; note = misc_feature - bicyclic nucleic acid scaffold modification
  source 1..16: mol_type = other RNA
tttctcaacagatctg

SEQ ID NO: 3142 - RNA, 16 nt, synthetic construct
  modified_base 1: mod_base = OTHER; note = thymine
  misc_feature 1..16: note = Antisense oligonucleotide
  modified_base 1: mod_base = OTHER; note = misc_feature - bicyclic nucleic acid scaffold modification
  modified_base 4: mod_base = OTHER; note = misc_feature - bicyclic nucleic acid scaffold modification
  modified_base 14: mod_base = OTHER; note = misc_feature - bicyclic nucleic acid scaffold modification
  modified_base 16: mod_base = OTHER; note = misc_feature - bicyclic nucleic acid scaffold modification
  source 1..16: mol_type = other RNA
tttctcaacagatctg

SEQ ID NO: 3143 - RNA, 16 nt, synthetic construct
  modified_base 1: mod_base = OTHER; note = thymine
  misc_feature 1..16: note = Antisense oligonucleotide
  modified_base 1: mod_base = OTHER; note = misc_feature - bicyclic nucleic acid scaffold modification
  modified_base 6: mod_base = OTHER; note = misc_feature - bicyclic nucleic acid scaffold modification
  modified_base 11: mod_base = OTHER; note = misc_feature - bicyclic nucleic acid scaffold modification
  modified_base 16: mod_base = OTHER; note = misc_feature - bicyclic nucleic acid scaffold modification
  source 1..16: mol_type = other RNA
tttctcaacagatctg

SEQ ID NO: 3144 - RNA, 16 nt, synthetic construct
  modified_base 1: mod_base = OTHER; note = thymine
  modified_base 15: mod_base = OTHER; note = thymine
  misc_feature 1..16: note = Antisense oligonucleotide
  modified_base 1: mod_base = OTHER; note = misc_feature - bicyclic nucleic acid scaffold modification
  modified_base 11: mod_base = OTHER; note = misc_feature - bicyclic nucleic acid scaffold modification
  modified_base 15..16: mod_base = OTHER; note = misc_feature - bicyclic nucleic acid scaffold modification
  source 1..16: mol_type = other RNA
tttctcaacagatctg

SEQ ID NO: 3145 - RNA, 16 nt, synthetic construct
  modified_base 1: mod_base = OTHER; note = thymine
  modified_base 15: mod_base = OTHER; note = thymine
  misc_feature 1..16: note = Antisense oligonucleotide
  modified_base 1: mod_base = OTHER; note = misc_feature - bicyclic nucleic acid scaffold modification
  modified_base 4: mod_base = OTHER; note = misc_feature - bicyclic nucleic acid scaffold modification
  modified_base 9: mod_base = OTHER; note = misc_feature - bicyclic nucleic acid scaffold modification
  modified_base 15..16: mod_base = OTHER; note = misc_feature - bicyclic nucleic acid scaffold modification
  source 1..16: mol_type = other RNA
tttctcaacagatctg

SEQ ID NO: 3146 - RNA, 16 nt, synthetic construct
  modified_base 1..2: mod_base = OTHER; note = thymine
  modified_base 15: mod_base = OTHER; note = thymine
  misc_feature 1..16: note = Antisense oligonucleotide
  modified_base 1..2: mod_base = OTHER; note = misc_feature - bicyclic nucleic acid scaffold modification
  modified_base 15..16: mod_base = OTHER; note = misc_feature - bicyclic nucleic acid scaffold modification
  source 1..16: mol_type = other RNA
tttctcaacagatctg

SEQ ID NO: 3147 - RNA, 16 nt, synthetic construct
  modified_base 1: mod_base = OTHER; note = thymine
  modified_base 16: mod_base = OTHER; note = thymine
  misc_feature 1..16: note = Antisense oligonucleotide
  modified_base 1: mod_base = OTHER; note = misc_feature - bicyclic nucleic acid scaffold modification
  modified_base 16: mod_base = OTHER; note = misc_feature - bicyclic nucleic acid scaffold modification
  source 1..16: mol_type = other RNA
ttctcaacagatctgt

SEQ ID NO: 3148 - RNA, 16 nt, synthetic construct
  modified_base 1: mod_base = OTHER; note = thymine
  modified_base 16: mod_base = OTHER; note = thymine
  misc_feature 1..16: note = Antisense oligonucleotide
  modified_base 1: mod_base = OTHER; note = misc_feature - bicyclic nucleic acid scaffold modification
  modified_base 15..16: mod_base = OTHER; note = misc_feature - bicyclic nucleic acid scaffold modification
  source 1..16: mol_type = other RNA
ttctcaacagatctgt

SEQ ID NO: 3149 - RNA, 16 nt, synthetic construct
  modified_base 1: mod_base = OTHER; note = thymine
  modified_base 16: mod_base = OTHER; note = thymine
  misc_feature 1..16: note = Antisense oligonucleotide
  modified_base 1: mod_base = OTHER; note = misc_feature - bicyclic nucleic acid scaffold modification
  modified_base 13: mod_base = OTHER; note = misc_feature - bicyclic nucleic acid scaffold modification
  modified_base 16: mod_base = OTHER; note = misc_feature - bicyclic nucleic acid scaffold modification
  source 1..16: mol_type = other RNA
ttctcaacagatctgt

SEQ ID NO: 3150 - RNA, 16 nt, synthetic construct
  modified_base 1: mod_base = OTHER; note = thymine
  modified_base 16: mod_base = OTHER; note = thymine
  misc_feature 1..16: note = Antisense oligonucleotide
  modified_base 1: mod_base = OTHER; note = misc_feature - bicyclic nucleic acid scaffold modification
  modified_base 10: mod_base = OTHER; note = misc_feature - bicyclic nucleic acid scaffold modification
  modified_base 16: mod_base = OTHER; note = misc_feature - bicyclic nucleic acid scaffold modification
  source 1..16: mol_type = other RNA
ttctcaacagatctgt

SEQ ID NO: 3151 - RNA, 16 nt, synthetic construct
  modified_base 1: mod_base = OTHER; note = thymine
  modified_base 16: mod_base = OTHER; note = thymine
  misc_feature 1..16: note = Antisense oligonucleotide
  modified_base 1: mod_base = OTHER; note = misc_feature - bicyclic nucleic acid scaffold modification
  modified_base 8: mod_base = OTHER; note = misc_feature - bicyclic nucleic acid scaffold modification
  modified_base 16: mod_base = OTHER; note = misc_feature - bicyclic nucleic acid scaffold modification
  source 1..16: mol_type = other RNA
ttctcaacagatctgt

SEQ ID NO: 3152 - RNA, 16 nt, synthetic construct
  modified_base 1: mod_base = OTHER; note = thymine
  modified_base 16: mod_base = OTHER; note = thymine
  misc_feature 1..16: note = Antisense oligonucleotide
  modified_base 1: mod_base = OTHER; note = misc_feature - bicyclic nucleic acid scaffold modification
  modified_base 5: mod_base = OTHER; note = misc_feature - bicyclic nucleic acid scaffold modification
  modified_base 16: mod_base = OTHER; note = misc_feature - bicyclic nucleic acid scaffold modification
  source 1..16: mol_type = other RNA
ttctcaacagatctgt

SEQ ID NO: 3153 - RNA, 16 nt, synthetic construct
  modified_base 1: mod_base = OTHER; note = thymine
  modified_base 16: mod_base = OTHER; note = thymine
  misc_feature 1..16: note = Antisense oligonucleotide
  modified_base 1: mod_base = OTHER; note = misc_feature - bicyclic nucleic acid scaffold modification
  modified_base 3: mod_base = OTHER; note = misc_feature - bicyclic nucleic acid scaffold modification
  modified_base 16: mod_base = OTHER; note = misc_feature - bicyclic nucleic acid scaffold modification
  source 1..16: mol_type = other RNA
ttctcaacagatctgt

SEQ ID NO: 3154 - RNA, 16 nt, synthetic construct
  modified_base 1: mod_base = OTHER; note = thymine
  modified_base 16: mod_base = OTHER; note = thymine
  misc_feature 1..16: note = Antisense oligonucleotide
  modified_base 1: mod_base = OTHER; note = misc_feature - bicyclic nucleic acid scaffold modification
  modified_base 10: mod_base = OTHER; note = misc_feature - bicyclic nucleic acid scaffold modification
  modified_base 15..16: mod_base = OTHER; note = misc_feature - bicyclic nucleic acid scaffold modification
  source 1..16: mol_type = other RNA
ttctcaacagatctgt

SEQ ID NO: 3155 - RNA, 16 nt, synthetic construct
  modified_base 1: mod_base = OTHER; note = thymine
  modified_base 16: mod_base = OTHER; note = thymine
  misc_feature 1..16: note = Antisense oligonucleotide
  modified_base 1: mod_base = OTHER; note = misc_feature - bicyclic nucleic acid scaffold modification
  modified_base 8: mod_base = OTHER; note = misc_feature - bicyclic nucleic acid scaffold modification
  modified_base 13: mod_base = OTHER; note = misc_feature - bicyclic nucleic acid scaffold modification
  modified_base 16: mod_base = OTHER; note = misc_feature - bicyclic nucleic acid scaffold modification
  source 1..16: mol_type = other RNA
ttctcaacagatctgt

SEQ ID NO: 3156 - RNA, 16 nt, synthetic construct
  modified_base 1: mod_base = OTHER; note = thymine
  modified_base 16: mod_base = OTHER; note = thymine
  misc_feature 1..16: note = Antisense oligonucleotide
  modified_base 1: mod_base = OTHER; note = misc_feature - bicyclic nucleic acid scaffold modification
  modified_base 3: mod_base = OTHER; note = misc_feature - bicyclic nucleic acid scaffold modification
  modified_base 8: mod_base = OTHER; note = misc_feature - bicyclic nucleic acid scaffold modification
  modified_base 16: mod_base = OTHER; note = misc_feature - bicyclic nucleic acid scaffold modification
  source 1..16: mol_type = other RNA
ttctcaacagatctgt

SEQ ID NO: 3157 - RNA, 16 nt, synthetic construct
  modified_base 1: mod_base = OTHER; note = thymine
  modified_base 16: mod_base = OTHER; note = thymine
  misc_feature 1..16: note = Antisense oligonucleotide
  modified_base 1: mod_base = OTHER; note = misc_feature - bicyclic nucleic acid scaffold modification
  modified_base 5: mod_base = OTHER; note = misc_feature - bicyclic nucleic acid scaffold modification
  modified_base 10: mod_base = OTHER; note = misc_feature - bicyclic nucleic acid scaffold modification
  modified_base 15..16: mod_base = OTHER; note = misc_feature - bicyclic nucleic acid scaffold modification
  source 1..16: mol_type = other RNA
ttctcaacagatctgt

SEQ ID NO: 3158 - RNA, 16 nt, synthetic construct
  modified_base 1..2: mod_base = OTHER; note = thymine
  modified_base 16: mod_base = OTHER; note = thymine
  misc_feature 1..16: note = Antisense oligonucleotide
  modified_base 1..2: mod_base = OTHER; note = misc_feature - bicyclic nucleic acid scaffold modification
  modified_base 15..16: mod_base = OTHER; note = misc_feature - bicyclic nucleic acid scaffold modification
  source 1..16: mol_type = other RNA
ttctcaacagatctgt

SEQ ID NO: 3159 - RNA, 16 nt, synthetic construct
  modified_base 1..2: mod_base = OTHER; note = thymine
  modified_base 16: mod_base = OTHER; note = thymine
  misc_feature 1..16: note = Antisense oligonucleotide
  modified_base 1..2: mod_base = OTHER; note = misc_feature - bicyclic nucleic acid scaffold modification
  modified_base 10: mod_base = OTHER; note = misc_feature - bicyclic nucleic acid scaffold modification
  modified_base 15..16: mod_base = OTHER; note = misc_feature - bicyclic nucleic acid scaffold modification
  source 1..16: mol_type = other RNA
ttctcaacagatctgt

SEQ ID NO: 3160 - RNA, 16 nt, synthetic construct
  modified_base 1: mod_base = OTHER; note = thymine
  misc_feature 1..16: note = Antisense oligonucleotide
  modified_base 1: mod_base = OTHER; note = misc_feature - bicyclic nucleic acid scaffold modification
  modified_base 16: mod_base = OTHER; note = misc_feature - bicyclic nucleic acid scaffold modification
  source 1..16: mol_type = other RNA
tctcaacagatctgtc

SEQ ID NO: 3161 - RNA, 16 nt, synthetic construct
  modified_base 1: mod_base = OTHER; note = thymine
  misc_feature 1..16: note = Antisense oligonucleotide
  modified_base 1: mod_base = OTHER; note = misc_feature - bicyclic nucleic acid scaffold modification
  modified_base 14: mod_base = OTHER; note = misc_feature - bicyclic nucleic acid scaffold modification
  modified_base 16: mod_base = OTHER; note = misc_feature - bicyclic nucleic acid scaffold modification
  source 1..16: mol_type = other RNA
tctcaacagatctgtc

SEQ ID NO: 3162 - RNA, 16 nt, synthetic construct
  modified_base 1: mod_base = OTHER; note = thymine
  misc_feature 1..16: note = Antisense oligonucleotide
  modified_base 1: mod_base = OTHER; note = misc_feature - bicyclic nucleic acid scaffold modification
  modified_base 12: mod_base = OTHER; note = misc_feature - bicyclic nucleic acid scaffold modification
  modified_base 16: mod_base = OTHER; note = misc_feature - bicyclic nucleic acid scaffold modification
  source 1..16: mol_type = other RNA
tctcaacagatctgtc

SEQ ID NO: 3163 - RNA, 16 nt, synthetic construct
  modified_base 1: mod_base = OTHER; note = thymine
  misc_feature 1..16: note = Antisense oligonucleotide
  modified_base 1: mod_base = OTHER; note = misc_feature - bicyclic nucleic acid scaffold modification
  modified_base 9: mod_base = OTHER; note = misc_feature - bicyclic nucleic acid scaffold modification
  modified_base 16: mod_base = OTHER; note = misc_feature - bicyclic nucleic acid scaffold modification
  source 1..16: mol_type = other RNA
tctcaacagatctgtc

SEQ ID NO: 3164 - RNA, 16 nt, synthetic construct
  modified_base 1: mod_base = OTHER; note = thymine
  misc_feature 1..16: note = Antisense oligonucleotide
  modified_base 1: mod_base = OTHER; note = misc_feature - bicyclic nucleic acid scaffold modification
  modified_base 7: mod_base = OTHER; note = misc_feature - bicyclic nucleic acid scaffold modification
  modified_base 16: mod_base = OTHER; note = misc_feature - bicyclic nucleic acid scaffold modification
  source 1..16: mol_type = other RNA
tctcaacagatctgtc

SEQ ID NO: 3165 - RNA, 16 nt, synthetic construct
  modified_base 1: mod_base = OTHER; note = thymine
  misc_feature 1..16: note = Antisense oligonucleotide
  modified_base 1: mod_base = OTHER; note = misc_feature - bicyclic nucleic acid scaffold modification
  modified_base 4: mod_base = OTHER; note = misc_feature - bicyclic nucleic acid scaffold modification
  modified_base 16: mod_base = OTHER; note = misc_feature - bicyclic nucleic acid scaffold modification
  source 1..16: mol_type = other RNA
tctcaacagatctgtc

SEQ ID NO: 3166 - RNA, 16 nt, synthetic construct
  modified_base 1: mod_base = OTHER; note = thymine
  misc_feature 1..16: note = Antisense oligonucleotide
  modified_base 1..2: mod_base = OTHER; note = misc_feature - bicyclic nucleic acid scaffold modification
  modified_base 16: mod_base = OTHER; note = misc_feature - bicyclic nucleic acid scaffold modification
  source 1..16: mol_type = other RNA
tctcaacagatctgtc

SEQ ID NO: 3167 - RNA, 16 nt, synthetic construct
  modified_base 1: mod_base = OTHER; note = thymine
  misc_feature 1..16: note = Antisense oligonucleotide
  modified_base 1: mod_base = OTHER; note = misc_feature - bicyclic nucleic acid scaffold modification
  modified_base 9: mod_base = OTHER; note = misc_feature - bicyclic nucleic acid scaffold modification
  modified_base 14: mod_base = OTHER; note = misc_feature - bicyclic nucleic acid scaffold modification
  modified_base 16: mod_base = OTHER; note = misc_feature - bicyclic nucleic acid scaffold modification
  source 1..16: mol_type = other RNA
tctcaacagatctgtc

SEQ ID NO: 3168 - RNA, 16 nt, synthetic construct
  modified_base 1: mod_base = OTHER; note = thymine
  misc_feature 1..16: note = Antisense oligonucleotide
  modified_base 1: mod_base = OTHER; note = misc_feature - bicyclic nucleic acid scaffold modification
  modified_base 7: mod_base = OTHER; note = misc_feature - bicyclic nucleic acid scaffold modification
  modified_base 12: mod_base = OTHER; note = misc_feature - bicyclic nucleic acid scaffold modification
  modified_base 16: mod_base = OTHER; note = misc_feature - bicyclic nucleic acid scaffold modification
  source 1..16: mol_type = other RNA
tctcaacagatctgtc

SEQ ID NO: 3169 - RNA, 16 nt, synthetic construct
  modified_base 1: mod_base = OTHER; note = thymine
  misc_feature 1..16: note = Antisense oligonucleotide
  modified_base 1: mod_base = OTHER; note = misc_feature - bicyclic nucleic acid scaffold modification
  modified_base 4: mod_base = OTHER; note = misc_feature - bicyclic nucleic acid scaffold modification
  modified_base 9: mod_base = OTHER; note = misc_feature - bicyclic nucleic acid scaffold modification
  modified_base 16: mod_base = OTHER; note = misc_feature - bicyclic nucleic acid scaffold modification
  source 1..16: mol_type = other RNA
tctcaacagatctgtc

SEQ ID NO: 3170 - RNA, 16 nt, synthetic construct
  modified_base 1: mod_base = OTHER; note = thymine
  modified_base 15: mod_base = OTHER; note = thymine
  misc_feature 1..16: note = Antisense oligonucleotide
  modified_base 1..2: mod_base = OTHER; note = misc_feature - bicyclic nucleic acid scaffold modification
  modified_base 15..16: mod_base = OTHER; note = misc_feature - bicyclic nucleic acid scaffold modification
  source 1..16: mol_type = other RNA
tctcaacagatctgtc

SEQ ID NO: 3171 - RNA, 16 nt, synthetic construct
  modified_base 1: mod_base = OTHER; note = thymine
  modified_base 15: mod_base = OTHER; note = thymine
  misc_feature 1..16: note = Antisense oligonucleotide
  modified_base 1..2: mod_base = OTHER; note = misc_feature - bicyclic nucleic acid scaffold modification
  modified_base 9: mod_base = OTHER; note = misc_feature - bicyclic nucleic acid scaffold modification
  modified_base 15..16: mod_base = OTHER; note = misc_feature - bicyclic nucleic acid scaffold modification
  source 1..16: mol_type = other RNA
tctcaacagatctgtc

SEQ ID NO: 3172 - RNA, 16 nt, synthetic construct
  misc_feature 1..16: note = Antisense oligonucleotide
  modified_base 1: mod_base = OTHER; note = misc_feature - bicyclic nucleic acid scaffold modification
  modified_base 16: mod_base = OTHER; note = misc_feature - bicyclic nucleic acid scaffold modification
  source 1..16: mol_type = other RNA
ctcaacagatctgtca

SEQ ID NO: 3173 - RNA, 16 nt, synthetic construct
  misc_feature 1..16: note = Antisense oligonucleotide
  modified_base 1: mod_base = OTHER; note = misc_feature - bicyclic nucleic acid scaffold modification
  modified_base 15..16: mod_base = OTHER; note = misc_feature - bicyclic nucleic acid scaffold modification
  source 1..16: mol_type = other RNA
ctcaacagatctgtca

SEQ ID NO: 3174 - RNA, 16 nt, synthetic construct
  misc_feature 1..16: note = Antisense oligonucleotide
  modified_base 1: mod_base = OTHER; note = misc_feature - bicyclic nucleic acid scaffold modification
  modified_base 13: mod_base = OTHER; note = misc_feature - bicyclic nucleic acid scaffold modification
  modified_base 16: mod_base = OTHER; note = misc_feature - bicyclic nucleic acid scaffold modification
  source 1..16: mol_type = other RNA
ctcaacagatctgtca

SEQ ID NO: 3175 - RNA, 16 nt, synthetic construct
  misc_feature 1..16: note = Antisense oligonucleotide
  modified_base 1: mod_base = OTHER; note = misc_feature - bicyclic nucleic acid scaffold modification
  modified_base 11: mod_base = OTHER; note = misc_feature - bicyclic nucleic acid scaffold modification
  modified_base 16: mod_base = OTHER; note = misc_feature - bicyclic nucleic acid scaffold modification
  source 1..16: mol_type = other RNA
ctcaacagatctgtca

SEQ ID NO: 3176 - RNA, 16 nt, synthetic construct
  misc_feature 1..16: note = Antisense oligonucleotide
  modified_base 1: mod_base = OTHER; note = misc_feature - bicyclic nucleic acid scaffold modification
  modified_base 8: mod_base = OTHER; note = misc_feature - bicyclic nucleic acid scaffold modification
  modified_base 16: mod_base = OTHER; note = misc_feature - bicyclic nucleic acid scaffold modification
  source 1..16: mol_type = other RNA
ctcaacagatctgtca

SEQ ID NO: 3177 - RNA, 16 nt, synthetic construct
  misc_feature 1..16: note = Antisense oligonucleotide
  modified_base 1: mod_base = OTHER; note = misc_feature - bicyclic nucleic acid scaffold modification
  modified_base 6: mod_base = OTHER; note = misc_feature - bicyclic nucleic acid scaffold modification
  modified_base 16: mod_base = OTHER; note = misc_feature - bicyclic nucleic acid scaffold modification
  source 1..16: mol_type = other RNA
ctcaacagatctgtca

SEQ ID NO: 3178 - RNA, 16 nt, synthetic construct
  misc_feature 1..16: note = Antisense oligonucleotide
  modified_base 1: mod_base = OTHER; note = misc_feature - bicyclic nucleic acid scaffold modification
  modified_base 3: mod_base = OTHER; note = misc_feature - bicyclic nucleic acid scaffold modification
  modified_base 16: mod_base = OTHER; note = misc_feature - bicyclic nucleic acid scaffold modification
  source 1..16: mol_type = other RNA
ctcaacagatctgtca

SEQ ID NO: 3179 - RNA, 16 nt, synthetic construct
  misc_feature 1..16: note = Antisense oligonucleotide
  modified_base 1: mod_base = OTHER; note = misc_feature - bicyclic nucleic acid scaffold modification
  modified_base 8: mod_base = OTHER; note = misc_feature - bicyclic nucleic acid scaffold modification
  modified_base 13: mod_base = OTHER; note = misc_feature - bicyclic nucleic acid scaffold modification
  modified_base 16: mod_base = OTHER; note = misc_feature - bicyclic nucleic acid scaffold modification
  source 1..16: mol_type = other RNA
ctcaacagatctgtca

SEQ ID NO: 3180 - RNA, 16 nt, synthetic construct
  misc_feature 1..16: note = Antisense oligonucleotide
  modified_base 1: mod_base = OTHER; note = misc_feature - bicyclic nucleic acid scaffold modification
  modified_base 6: mod_base = OTHER; note = misc_feature - bicyclic nucleic acid scaffold modification
  modified_base 11: mod_base = OTHER; note = misc_feature - bicyclic nucleic acid scaffold modification
  modified_base 16: mod_base = OTHER; note = misc_feature - bicyclic nucleic acid scaffold modification
  source 1..16: mol_type = other RNA
ctcaacagatctgtca

SEQ ID NO: 3181 - RNA, 16 nt, synthetic construct
  misc_feature 1..16: note = Antisense oligonucleotide
  modified_base 1: mod_base = OTHER; note = misc_feature - bicyclic nucleic acid scaffold modification
  modified_base 3: mod_base = OTHER; note = misc_feature - bicyclic nucleic acid scaffold modification
  modified_base 13: mod_base = OTHER; note = misc_feature - bicyclic nucleic acid scaffold modification
  modified_base 16: mod_base = OTHER; note = misc_feature - bicyclic nucleic acid scaffold modification
  source 1..16: mol_type = other RNA
ctcaacagatctgtca

SEQ ID NO: 3182 - RNA, 16 nt, synthetic construct
  modified_base 2: mod_base = OTHER; note = thymine
  misc_feature 1..16: note = Antisense oligonucleotide
  modified_base 1..2: mod_base = OTHER; note = misc_feature - bicyclic nucleic acid scaffold modification
  modified_base 15..16: mod_base = OTHER; note = misc_feature - bicyclic nucleic acid scaffold modification
  source 1..16: mol_type = other RNA
ctcaacagatctgtca

SEQ ID NO: 3183 - RNA, 16 nt, synthetic construct
  misc_feature 1..16: note = Antisense oligonucleotide
  modified_base 1..2: mod_base = OTHER; note = misc_feature - bicyclic nucleic acid scaffold modification
  modified_base 8: mod_base = OTHER; note = misc_feature - bicyclic nucleic acid scaffold modification
  modified_base 15..16: mod_base = OTHER; note = misc_feature - bicyclic nucleic acid scaffold modification
  source 1..16: mol_type = other RNA
ctcaacagatctgtca

SEQ ID NO: 3184 - RNA, 16 nt, synthetic construct
  misc_feature 1..16: note = Antisense oligonucleotide
  modified_base 1: mod_base = OTHER; note = misc_feature - bicyclic nucleic acid scaffold modification
  modified_base 3: mod_base = OTHER; note = misc_feature - bicyclic nucleic acid scaffold modification
  modified_base 8: mod_base = OTHER; note = misc_feature - bicyclic nucleic acid scaffold modification
  modified_base 13: mod_base = OTHER; note = misc_feature - bicyclic nucleic acid scaffold modification
  modified_base 16: mod_base = OTHER; note = misc_feature - bicyclic nucleic acid scaffold modification
  source 1..16: mol_type = other RNA
ctcaacagatctgtca

SEQ ID NO: 3185 - RNA, 25 nt, synthetic construct
  misc_feature 1..25: note = Antisense oligonucleotide
  source 1..25: mol_type = other RNA
  modified_base 1: mod_base = OTHER; note = misc_feature - locked thymine bicyclic nucleic acid scaffold modification phosphorothioate
  modified_base 2: mod_base = OTHER; note = 2'-O-methyl uridine phosphorothioate
  modified_base 3: mod_base = OTHER; note = 2'-O-methyl uridine phosphorothioate
  modified_base 4: mod_base = OTHER; note = 2'-O-methyl guanosine phosphorothioate
  modified_base 5: mod_base = OTHER; note = 5-methylcytosine phosphorothioate
  modified_base 6: mod_base = OTHER; note = 5-methylcytosine phosphorothioate
  modified_base 7: mod_base = OTHER; note = 2'-O-methyl guanosine phosphorothioate
  modified_base 8: mod_base = OTHER; note = 5-methylcytosine phosphorothioate
  modified_base 9: mod_base = OTHER; note = 2'-O-methyl uridine phosphorothioate
  modified_base 10: mod_base = OTHER; note = 2'-O-methyl guanosine phosphorothioate
  modified_base 11: mod_base = OTHER; note = 5-methylcytosine phosphorothioate
  modified_base 12: mod_base = OTHER; note = 5-methylcytosine phosphorothioate
  modified_base 13: mod_base = OTHER; note = 5-methylcytosine phosphorothioate
  modified_base 14: mod_base = OTHER; note = 2'-O-methyl adenosine phosphorothioate
  modified_base 15: mod_base = OTHER; note = 2'-O-methyl adenosine phosphorothioate
  modified_base 16: mod_base = OTHER; note = 2'-O-methyl uridine phosphorothioate
  modified_base 17: mod_base = OTHER; note = 2'-O-methyl guanosine phosphorothioate
  modified_base 18: mod_base = OTHER; note = 5-methylcytosine phosphorothioate
  modified_base 19: mod_base = OTHER; note = 5-methylcytosine phosphorothioate
  modified_base 20: mod_base = OTHER; note = 2'-O-methyl adenosine phosphorothioate
  modified_base 21: mod_base = OTHER; note = 2'-O-methyl uridine phosphorothioate
  modified_base 22: mod_base = OTHER; note = 5-methylcytosine phosphorothioate
  modified_base 23: mod_base = OTHER; note = 5-methylcytosine phosphorothioate
  modified_base 24: mod_base = OTHER; note = 2'-O-methyl uridine phosphorothioate
  modified_base 25: mod_base = OTHER; note = misc_feature - locked bicyclic nucleic acid scaffold modification
tttgccgctgcccaatgccatcctg

SEQ ID NO: 3186 - RNA, 25 nt, synthetic construct
  modified_base 1: mod_base = OTHER; note = thymine
  misc_feature 1..25: note = Antisense oligonucleotide
  modified_base 1: mod_base = OTHER; note = misc_feature - bicyclic nucleic acid scaffold modification
  modified_base 4: mod_base = OTHER; note = misc_feature - bicyclic nucleic acid scaffold modification
  modified_base 25: mod_base = OTHER; note = misc_feature - bicyclic nucleic acid scaffold modification
  source 1..25: mol_type = other RNA
tttgccgctgcccaatgccatcctg

SEQ ID NO: 3187 - RNA, 25 nt, synthetic construct
  modified_base 1: mod_base = OTHER; note = thymine
  misc_feature 1..25: note = Antisense oligonucleotide
  modified_base 1: mod_base = OTHER; note = misc_feature - bicyclic nucleic acid scaffold modification
  modified_base 7: mod_base = OTHER; note = misc_feature - bicyclic nucleic acid scaffold modification
  modified_base 25: mod_base = OTHER; note = misc_feature - bicyclic nucleic acid scaffold modification
  source 1..25: mol_type = other RNA
tttgccgctgcccaatgccatcctg

SEQ ID NO: 3188 - RNA, 25 nt, synthetic construct
  modified_base 1: mod_base = OTHER; note = thymine
  misc_feature 1..25: note = Antisense oligonucleotide
  modified_base 1: mod_base = OTHER; note = misc_feature - bicyclic nucleic acid scaffold modification
  modified_base 10: mod_base = OTHER; note = misc_feature - bicyclic nucleic acid scaffold modification
  modified_base 25: mod_base = OTHER; note = misc_feature - bicyclic nucleic acid scaffold modification
  source 1..25: mol_type = other RNA
tttgccgctgcccaatgccatcctg

SEQ ID NO: 3189 - RNA, 25 nt, synthetic construct
  modified_base 1: mod_base = OTHER; note = thymine
  misc_feature 1..25: note = Antisense oligonucleotide
  modified_base 1: mod_base = OTHER; note = misc_feature - bicyclic nucleic acid scaffold modification
  modified_base 17: mod_base = OTHER; note = misc_feature - bicyclic nucleic acid scaffold modification
  modified_base 25: mod_base = OTHER; note = misc_feature - bicyclic nucleic acid scaffold modification
  source 1..25: mol_type = other RNA
tttgccgctgcccaatgccatcctg

SEQ ID NO: 3190 - RNA, 25 nt, synthetic construct
  modified_base 1: mod_base = OTHER; note = thymine
  misc_feature 1..25: note = Antisense oligonucleotide
  modified_base 1: mod_base = OTHER; note = misc_feature - bicyclic nucleic acid scaffold modification
  modified_base 5: mod_base = OTHER; note = misc_feature - bicyclic nucleic acid scaffold modification
  modified_base 25: mod_base = OTHER; note = misc_feature - bicyclic nucleic acid scaffold modification
  source 1..25: mol_type = other RNA
tttgccgctgcccaatgccatcctg

SEQ ID NO: 3191 - RNA, 25 nt, synthetic construct
  modified_base 1: mod_base = OTHER; note = thymine
  misc_feature 1..25: note = Antisense oligonucleotide
  modified_base 1: mod_base = OTHER; note = misc_feature - bicyclic nucleic acid scaffold modification
  modified_base 8: mod_base = OTHER; note = misc_feature - bicyclic nucleic acid scaffold modification
  modified_base 25: mod_base = OTHER; note = misc_feature - bicyclic nucleic acid scaffold modification
  source 1..25: mol_type = other RNA
tttgccgctgcccaatgccatcctg

SEQ ID NO: 3192 - RNA, 25 nt, synthetic construct
  modified_base 1: mod_base = OTHER; note = thymine
  misc_feature 1..25: note = Antisense oligonucleotide
  modified_base 1: mod_base = OTHER; note = misc_feature - bicyclic nucleic acid scaffold modification
  modified_base 12: mod_base = OTHER; note = misc_feature - bicyclic nucleic acid scaffold modification
  modified_base 25: mod_base = OTHER; note = misc_feature - bicyclic nucleic acid scaffold modification
  source 1..25: mol_type = other RNA
tttgccgctgcccaatgccatcctg

SEQ ID NO: 3193 - RNA, 25 nt, synthetic construct
  modified_base 1: mod_base = OTHER; note = thymine
  misc_feature 1..25: note = Antisense oligonucleotide
  modified_base 1: mod_base = OTHER; note = misc_feature - bicyclic nucleic acid scaffold modification
  modified_base 18: mod_base = OTHER; note = misc_feature - bicyclic nucleic acid scaffold modification
  modified_base 25: mod_base = OTHER; note = misc_feature - bicyclic nucleic acid scaffold modification
  source 1..25: mol_type = other RNA
tttgccgctgcccaatgccatcctg

SEQ ID NO: 3194 - RNA, 25 nt, synthetic construct
  modified_base 1: mod_base = OTHER; note = thymine
  misc_feature 1..25: note = Antisense oligonucleotide
  modified_base 1: mod_base = OTHER; note = misc_feature - bicyclic nucleic acid scaffold modification
  modified_base 22: mod_base = OTHER; note = misc_feature - bicyclic nucleic acid scaffold modification
  modified_base 25: mod_base = OTHER; note = misc_feature - bicyclic nucleic acid scaffold modification
  source 1..25: mol_type = other RNA
tttgccgctgcccaatgccatcctg

SEQ ID NO: 3195 - RNA, 25 nt, synthetic construct
  modified_base 1: mod_base = OTHER; note = thymine
  misc_feature 1..25: note = Antisense oligonucleotide
  modified_base 1: mod_base = OTHER; note = misc_feature - bicyclic nucleic acid scaffold modification
  modified_base 10: mod_base = OTHER; note = misc_feature - bicyclic nucleic acid scaffold modification
  modified_base 17: mod_base = OTHER; note = misc_feature - bicyclic nucleic acid scaffold modification
  modified_base 25: mod_base = OTHER; note = misc_feature - bicyclic nucleic acid scaffold modification
  source 1..25: mol_type = other RNA
tttgccgctgcccaatgccatcctg

SEQ ID NO: 3196 - RNA, 25 nt, synthetic construct
  modified_base 1: mod_base = OTHER; note = thymine
  misc_feature 1..25: note = Antisense oligonucleotide
  modified_base 1: mod_base = OTHER; note = misc_feature - bicyclic nucleic acid scaffold modification
  modified_base 4: mod_base = OTHER; note = misc_feature - bicyclic nucleic acid scaffold modification
  modified_base 17: mod_base = OTHER; note = misc_feature - bicyclic nucleic acid scaffold modification
  modified_base 25: mod_base = OTHER; note = misc_feature - bicyclic nucleic acid scaffold modification
  source 1..25: mol_type = other RNA
tttgccgctgcccaatgccatcctg

SEQ ID NO: 3197 - RNA, 25 nt, synthetic construct
  modified_base 1: mod_base = OTHER; note = thymine
  misc_feature 1..25: note = Antisense oligonucleotide
  modified_base 1: mod_base = OTHER; note = misc_feature - bicyclic nucleic acid scaffold modification
  modified_base 4: mod_base = OTHER; note = misc_feature - bicyclic nucleic acid scaffold modification
  modified_base 7: mod_base = OTHER; note = misc_feature - bicyclic nucleic acid scaffold modification
  modified_base 17: mod_base = OTHER; note = misc_feature - bicyclic nucleic acid scaffold modification
  modified_base 25: mod_base = OTHER; note = misc_feature - bicyclic nucleic acid scaffold modification
  source 1..25: mol_type = other RNA
tttgccgctgcccaatgccatcctg

SEQ ID NO: 3198 - RNA, 25 nt, synthetic construct
  modified_base 1: mod_base = OTHER; note = thymine
  misc_feature 1..25: note = Antisense oligonucleotide
  modified_base 1: mod_base = OTHER; note = misc_feature - bicyclic nucleic acid scaffold modification
  modified_base 4: mod_base = OTHER; note = misc_feature - bicyclic nucleic acid scaffold modification
  modified_base 10: mod_base = OTHER; note = misc_feature - bicyclic nucleic acid scaffold modification
  modified_base 17: mod_base = OTHER; note = misc_feature - bicyclic nucleic acid scaffold modification
  modified_base 25: mod_base = OTHER; note = misc_feature - bicyclic nucleic acid scaffold modification
  source 1..25: mol_type = other RNA
tttgccgctgcccaatgccatcctg

SEQ ID NO: 3199 - RNA, 25 nt, synthetic construct
  modified_base 1..2: mod_base = OTHER; note = thymine
  modified_base 24: mod_base = OTHER; note = thymine
  misc_feature 1..25: note = Antisense oligonucleotide
  modified_base 1..2: mod_base = OTHER; note = misc_feature - bicyclic nucleic acid scaffold modification
  modified_base 24..25: mod_base = OTHER; note = misc_feature - bicyclic nucleic acid scaffold modification
  source 1..25: mol_type = other RNA
tttgccgctgcccaatgccatcctg

SEQ ID NO: 3200 - RNA, 25 nt, synthetic construct
  modified_base 1..2: mod_base = OTHER; note = thymine
  modified_base 24: mod_base = OTHER; note = thymine
  misc_feature 1..25: note = Antisense oligonucleotide
  modified_base 1..2: mod_base = OTHER; note = misc_feature - bicyclic nucleic acid scaffold modification
  modified_base 10: mod_base = OTHER; note = misc_feature - bicyclic nucleic acid scaffold modification
  modified_base 17: mod_base = OTHER; note = misc_feature - bicyclic nucleic acid scaffold modification
  modified_base 24..25: mod_base = OTHER; note = misc_feature - bicyclic nucleic acid scaffold modification
  source 1..25: mol_type = other RNA
tttgccgctgcccaatgccatcctg

SEQ ID NO: 3201 - RNA, 22 nt, synthetic construct
  modified_base 1: mod_base = OTHER; note = thymine
  misc_feature 1..22: note = Antisense oligonucleotide
  modified_base 1: mod_base = OTHER; note = misc_feature - bicyclic nucleic acid scaffold modification
  modified_base 4: mod_base = OTHER; note = misc_feature - bicyclic nucleic acid scaffold modification
  modified_base 22: mod_base = OTHER; note = misc_feature - bicyclic nucleic acid scaffold modification
  source 1..22: mol_type = other RNA
tttgccgctgcccaatgccatc

SEQ ID NO: 3202 - RNA, 22 nt, synthetic construct
  modified_base 1: mod_base = OTHER; note = thymine
  misc_feature 1..22: note = Antisense oligonucleotide
  modified_base 1: mod_base = OTHER; note = misc_feature - bicyclic nucleic acid scaffold modification
  modified_base 7: mod_base = OTHER; note = misc_feature - bicyclic nucleic acid scaffold modification
  modified_base 22: mod_base = OTHER; note = misc_feature - bicyclic nucleic acid scaffold modification
  source 1..22: mol_type = other RNA
tttgccgctgcccaatgccatc

SEQ ID NO: 3203 - RNA, 22 nt, synthetic construct
  modified_base 1: mod_base = OTHER; note = thymine
  misc_feature 1..22: note = Antisense oligonucleotide
  modified_base 1: mod_base = OTHER; note = misc_feature - bicyclic nucleic acid scaffold modification
  modified_base 10: mod_base = OTHER; note = misc_feature - bicyclic nucleic acid scaffold modification
  modified_base 22: mod_base = OTHER; note = misc_feature - bicyclic nucleic acid scaffold modification
  source 1..22: mol_type = other RNA
tttgccgctgcccaatgccatc

SEQ ID NO: 3204 - RNA, 22 nt, synthetic construct
  modified_base 1: mod_base = OTHER; note = thymine
  misc_feature 1..22: note = Antisense oligonucleotide
  modified_base 1: mod_base = OTHER; note = misc_feature - bicyclic nucleic acid scaffold modification
  modified_base 17: mod_base = OTHER; note = misc_feature - bicyclic nucleic acid scaffold modification
  modified_base 22: mod_base = OTHER; note = misc_feature - bicyclic nucleic acid scaffold modification
  source 1..22: mol_type = other RNA
tttgccgctgcccaatgccatc

SEQ ID NO: 3205 - RNA, 22 nt, synthetic construct
  modified_base 1: mod_base = OTHER; note = thymine
  misc_feature 1..22: note = Antisense oligonucleotide
  modified_base 1: mod_base = OTHER; note = misc_feature - bicyclic nucleic acid scaffold modification
  modified_base 8: mod_base = OTHER; note = misc_feature - bicyclic nucleic acid scaffold modification
  modified_base 22: mod_base = OTHER; note = misc_feature - bicyclic nucleic acid scaffold modification
  source 1..22: mol_type = other RNA
tttgccgctgcccaatgccatc

SEQ ID NO: 3206 - RNA, 22 nt, synthetic construct
  modified_base 1: mod_base = OTHER; note = thymine
  misc_feature 1..22: note = Antisense oligonucleotide
  modified_base 1: mod_base = OTHER; note = misc_feature - bicyclic nucleic acid scaffold modification
  modified_base 13: mod_base = OTHER; note = misc_feature - bicyclic nucleic acid scaffold modification
  modified_base 22: mod_base = OTHER; note = misc_feature - bicyclic nucleic acid scaffold modification
  source 1..22: mol_type = other RNA
tttgccgctgcccaatgccatc

SEQ ID NO: 3207 - RNA, 22 nt, synthetic construct
  modified_base 1: mod_base = OTHER; note = thymine
  misc_feature 1..22: note = Antisense oligonucleotide
  modified_base 1: mod_base = OTHER; note = misc_feature - bicyclic nucleic acid scaffold modification
  modified_base 19: mod_base = OTHER; note = misc_feature - bicyclic nucleic acid scaffold modification
  modified_base 22: mod_base = OTHER; note = misc_feature - bicyclic nucleic acid scaffold modification
  source 1..22: mol_type = other RNA
tttgccgctgcccaatgccatc

SEQ ID NO: 3208 - RNA, 22 nt, synthetic construct
  modified_base 1: mod_base = OTHER; note = thymine
  misc_feature 1..22: note = Antisense oligonucleotide
  modified_base 1: mod_base = OTHER; note = misc_feature - bicyclic nucleic acid scaffold modification
  modified_base 10: mod_base = OTHER; note = misc_feature - bicyclic nucleic acid scaffold modification
  modified_base 17: mod_base = OTHER; note = misc_feature - bicyclic nucleic acid scaffold modification
  modified_base 22: mod_base = OTHER; note = misc_feature - bicyclic nucleic acid scaffold modification
  source 1..22: mol_type = other RNA
tttgccgctgcccaatgccatc

SEQ ID NO: 3209 - RNA, 22 nt, synthetic construct
  modified_base 1: mod_base = OTHER; note = thymine
  misc_feature 1..22: note = Antisense oligonucleotide
  modified_base 1: mod_base = OTHER; note = misc_feature - bicyclic nucleic acid scaffold modification
  modified_base 4: mod_base = OTHER; note = misc_feature - bicyclic nucleic acid scaffold modification
  modified_base 17: mod_base = OTHER; note = misc_feature - bicyclic nucleic acid scaffold modification
  modified_base 22: mod_base = OTHER; note = misc_feature - bicyclic nucleic acid scaffold modification
  source 1..22: mol_type = other RNA
tttgccgctgcccaatgccatc

SEQ ID NO: 3210 - RNA, 22 nt, synthetic construct
  modified_base 1: mod_base = OTHER; note = thymine
  misc_feature 1..22: note = Antisense oligonucleotide
  modified_base 1: mod_base = OTHER; note = misc_feature - bicyclic nucleic acid scaffold modification
  modified_base 4: mod_base = OTHER; note = misc_feature - bicyclic nucleic acid scaffold modification
  modified_base 10: mod_base = OTHER; note = misc_feature - bicyclic nucleic acid scaffold modification
  modified_base 17: mod_base = OTHER; note = misc_feature - bicyclic nucleic acid scaffold modification
  modified_base 22: mod_base = OTHER; note = misc_feature - bicyclic nucleic acid scaffold modification
  source 1..22: mol_type = other RNA
tttgccgctgcccaatgccatc

SEQ ID NO: 3211 - RNA, 22 nt, synthetic construct
  modified_base 1: mod_base = OTHER; note = thymine
  misc_feature 1..22: note = Antisense oligonucleotide
  modified_base 1: mod_base = OTHER; note = misc_feature - bicyclic nucleic acid scaffold modification
  modified_base 8: mod_base = OTHER; note = misc_feature - bicyclic nucleic acid scaffold modification
  modified_base 13: mod_base = OTHER; note = misc_feature - bicyclic nucleic acid scaffold modification
  modified_base 19: mod_base = OTHER; note = misc_feature - bicyclic nucleic acid scaffold modification
  modified_base 22: mod_base = OTHER; note = misc_feature - bicyclic nucleic acid scaffold modification
  source 1..22: mol_type = other RNA
tttgccgctgcccaatgccatc

SEQ ID NO: 3212 - RNA, 22 nt, synthetic construct
  modified_base 1..2: mod_base = OTHER; note = thymine
  modified_base 21: mod_base = OTHER; note = thymine
  misc_feature 1..22: note = Antisense oligonucleotide
  modified_base 1..2: mod_base = OTHER; note = misc_feature - bicyclic nucleic acid scaffold modification
  modified_base 21..22: mod_base = OTHER; note = misc_feature - bicyclic nucleic acid scaffold modification
  source 1..22: mol_type = other RNA
tttgccgctgcccaatgccatc

SEQ ID NO: 3213 - RNA, 22 nt, synthetic construct
  modified_base 1..2: mod_base = OTHER; note = thymine
  modified_base 21: mod_base = OTHER; note = thymine
  misc_feature 1..22: note = Antisense oligonucleotide
  modified_base 1..2: mod_base = OTHER; note = misc_feature - bicyclic nucleic acid scaffold modification
  modified_base 10: mod_base = OTHER; note = misc_feature - bicyclic nucleic acid scaffold modification
  modified_base 21..22: mod_base = OTHER; note = misc_feature - bicyclic nucleic acid scaffold modification
  source 1..22: mol_type = other RNA
tttgccgctgcccaatgccatc

SEQ ID NO: 3214 - RNA, 22 nt, synthetic construct
  modified_base 1: mod_base = OTHER; note = thymine
  modified_base 21: mod_base = OTHER; note = thymine
  misc_feature 1..22: note = Antisense oligonucleotide
  modified_base 1: mod_base = OTHER; note = misc_feature - bicyclic nucleic acid scaffold modification
  modified_base 4: mod_base = OTHER; note = misc_feature - bicyclic nucleic acid scaffold modification
  modified_base 17: mod_base = OTHER; note = misc_feature - bicyclic nucleic acid scaffold modification
  modified_base 21..22: mod_base = OTHER; note = misc_feature - bicyclic nucleic acid scaffold modification
  source 1..22: mol_type = other RNA
tttgccgctgcccaatgccatc

SEQ ID NO: 3215 - RNA, 22 nt, synthetic construct
  modified_base 1: mod_base = OTHER; note = thymine
  modified_base 21: mod_base = OTHER; note = thymine
  misc_feature 1..22: note = Antisense oligonucleotide
  modified_base 1: mod_base = OTHER; note = misc_feature - bicyclic nucleic acid scaffold modification
  modified_base 4: mod_base = OTHER; note = misc_feature - bicyclic nucleic acid scaffold modification
  modified_base 10: mod_base = OTHER; note = misc_feature - bicyclic nucleic acid scaffold modification
  modified_base 21..22: mod_base = OTHER; note = misc_feature - bicyclic nucleic acid scaffold modification
  source 1..22: mol_type = other RNA
tttgccgctgcccaatgccatc

SEQ ID NO: 3216 - RNA, 22 nt, synthetic construct
  misc_feature 1..22: note = Antisense oligonucleotide
  modified_base 1: mod_base = OTHER; note = misc_feature - bicyclic nucleic acid scaffold modification
  modified_base 22: mod_base = OTHER; note = misc_feature - bicyclic nucleic acid scaffold modification
  source 1..22: mol_type = other RNA
gccgctgcccaatgccatcctg

SEQ ID NO: 3217 - RNA, 22 nt, synthetic construct
  misc_feature 1..22: note = Antisense oligonucleotide
  modified_base 1: mod_base = OTHER; note = misc_feature - bicyclic nucleic acid scaffold modification
  modified_base 4: mod_base = OTHER; note = misc_feature - bicyclic nucleic acid scaffold modification
  modified_base 22: mod_base = OTHER; note = misc_feature - bicyclic nucleic acid scaffold modification
  source 1..22: mol_type = other RNA
gccgctgcccaatgccatcctg

SEQ ID NO: 3218 - RNA, 22 nt, synthetic construct
  misc_feature 1..22: note = Antisense oligonucleotide
  modified_base 1: mod_base = OTHER; note = misc_feature - bicyclic nucleic acid scaffold modification
  modified_base 7: mod_base = OTHER; note = misc_feature - bicyclic nucleic acid scaffold modification
  modified_base 22: mod_base = OTHER; note = misc_feature - bicyclic nucleic acid scaffold modification
  source 1..22: mol_type = other RNA
gccgctgcccaatgccatcctg

SEQ ID NO: 3219 - RNA, 22 nt, synthetic construct
  misc_feature 1..22: note = Antisense oligonucleotide
  modified_base 1: mod_base = OTHER; note = misc_feature - bicyclic nucleic acid scaffold modification
  modified_base 14: mod_base = OTHER; note = misc_feature - bicyclic nucleic acid scaffold modification
  modified_base 22: mod_base = OTHER; note = misc_feature - bicyclic nucleic acid scaffold modification
  source 1..22: mol_type = other RNA
gccgctgcccaatgccatcctg

SEQ ID NO: 3220 - RNA, 22 nt, synthetic construct
  misc_feature 1..22: note = Antisense oligonucleotide
  modified_base 1: mod_base = OTHER; note = misc_feature - bicyclic nucleic acid scaffold modification
  modified_base 22: mod_base = OTHER; note = misc_feature - bicyclic nucleic acid scaffold modification
  source 1..22: mol_type = other RNA
gccgctgcccaatgccatcctg

SEQ ID NO: 3221 - RNA, 22 nt, synthetic construct
  misc_feature 1..22: note = Antisense oligonucleotide
  modified_base 1: mod_base = OTHER; note = misc_feature - bicyclic nucleic acid scaffold modification
  modified_base 10: mod_base = OTHER; note = misc_feature - bicyclic nucleic acid scaffold modification
  modified_base 22: mod_base = OTHER; note = misc_feature - bicyclic nucleic acid scaffold modification
  source 1..22: mol_type = other RNA
gccgctgcccaatgccatcctg

SEQ ID NO: 3222 - RNA, 22 nt, synthetic construct
  misc_feature 1..22: note = Antisense oligonucleotide
  modified_base 1: mod_base = OTHER; note = misc_feature - bicyclic nucleic acid scaffold modification
  modified_base 16: mod_base = OTHER; note = misc_feature - bicyclic nucleic acid scaffold modification
  modified_base 22: mod_base = OTHER; note = misc_feature - bicyclic nucleic acid scaffold modification
  source 1..22: mol_type = other RNA
gccgctgcccaatgccatcctg

SEQ ID NO: 3223 - RNA, 22 nt, synthetic construct
  misc_feature 1..22: note = Antisense oligonucleotide
  modified_base 1: mod_base = OTHER; note = misc_feature - bicyclic nucleic acid scaffold modification
  modified_base 20: mod_base = OTHER; note = misc_feature - bicyclic nucleic acid scaffold modification
  modified_base 22: mod_base = OTHER; note = misc_feature - bicyclic nucleic acid scaffold modification
  source 1..22: mol_type = other RNA
gccgctgcccaatgccatcctg

SEQ ID NO: 3224 - RNA, 22 nt, synthetic construct
  misc_feature 1..22: note = Antisense oligonucleotide
  modified_base 1: mod_base = OTHER; note = misc_feature - bicyclic nucleic acid scaffold modification
  modified_base 7: mod_base = OTHER; note = misc_feature - bicyclic nucleic acid scaffold modification
  modified_base 14: mod_base = OTHER; note = misc_feature - bicyclic nucleic acid scaffold modification
  modified_base 22: mod_base = OTHER; note = misc_feature - bicyclic nucleic acid scaffold modification
  source 1..22: mol_type = other RNA
gccgctgcccaatgccatcctg

SEQ ID NO: 3225 - RNA, 22 nt, synthetic construct
  misc_feature 1..22: note = Antisense oligonucleotide
  modified_base 1: mod_base = OTHER; note = misc_feature - bicyclic nucleic acid scaffold modification
  modified_base 10: mod_base = OTHER; note = misc_feature - bicyclic nucleic acid scaffold modification
  modified_base 19: mod_base = OTHER; note = misc_feature - bicyclic nucleic acid scaffold modification
  modified_base 22: mod_base = OTHER; note = misc_feature - bicyclic nucleic acid scaffold modification
  source 1..22: mol_type = other RNA
gccgctgcccaatgccatcctg

SEQ ID NO: 3226 - RNA, 22 nt, synthetic construct
  misc_feature 1..22: note = Antisense oligonucleotide
  modified_base 1: mod_base = OTHER; note = misc_feature - bicyclic nucleic acid scaffold modification
  modified_base 10: mod_base = OTHER; note = misc_feature - bicyclic nucleic acid scaffold modification
  modified_base 16: mod_base = OTHER; note = misc_feature - bicyclic nucleic acid scaffold modification
  modified_base 20: mod_base = OTHER; note = misc_feature - bicyclic nucleic acid scaffold modification
  modified_base 22: mod_base = OTHER; note = misc_feature - bicyclic nucleic acid scaffold modification
  source 1..22: mol_type = other RNA
gccgctgcccaatgccatcctg

SEQ ID NO: 3227 - RNA, 22 nt, synthetic construct
  modified_base 21: mod_base = OTHER; note = thymine
  misc_feature 1..22: note = Antisense oligonucleotide
  modified_base 1..2: mod_base = OTHER; note = misc_feature - bicyclic nucleic acid scaffold modification
  modified_base 21..22: mod_base = OTHER; note = misc_feature - bicyclic nucleic acid scaffold modification
  source 1..22: mol_type = other RNA
gccgctgcccaatgccatcctg

SEQ ID NO: 3228 - RNA, 22 nt, synthetic construct
  modified_base 21: mod_base = OTHER; note = thymine
  misc_feature 1..22: note = Antisense oligonucleotide
  modified_base 1..2: mod_base = OTHER; note = misc_feature - bicyclic nucleic acid scaffold modification
  modified_base 14: mod_base = OTHER; note = misc_feature - bicyclic nucleic acid scaffold modification
  modified_base 21..22: mod_base = OTHER; note = misc_feature - bicyclic nucleic acid scaffold modification
  source 1..22: mol_type = other RNA
gccgctgcccaatgccatcctg

SEQ ID NO: 3229 - RNA, 22 nt, synthetic construct
  modified_base 21: mod_base = OTHER; note = thymine
  misc_feature 1..22: note = Antisense oligonucleotide
  modified_base 1: mod_base = OTHER; note = misc_feature - bicyclic nucleic acid scaffold modification
  modified_base 7: mod_base = OTHER; note = misc_feature - bicyclic nucleic acid scaffold modification
  modified_base 14: mod_base = OTHER; note = misc_feature - bicyclic nucleic acid scaffold modification
  modified_base 21..22: mod_base = OTHER; note = misc_feature - bicyclic nucleic acid scaffold modification
  source 1..22: mol_type = other RNA
gccgctgcccaatgccatcctg

SEQ ID NO: 3230 - RNA, 22 nt, synthetic construct
  misc_feature 1..22: note = Antisense oligonucleotide
  modified_base 1: mod_base = OTHER; note = misc_feature - bicyclic nucleic acid scaffold modification
  modified_base 9: mod_base = OTHER; note = misc_feature - bicyclic nucleic acid scaffold modification
  modified_base 15: mod_base = OTHER; note = misc_feature - bicyclic nucleic acid scaffold modification
  modified_base 22: mod_base = OTHER; note = misc_feature - bicyclic nucleic acid scaffold modification
  source 1..22: mol_type = other RNA
gccgctgcccaatgccatcctg

SEQ ID NO: 3231 - RNA, 22 nt, synthetic construct
  modified_base 1: mod_base = OTHER; note = thymine
  misc_feature 1..22: note = Antisense oligonucleotide
  modified_base 1: mod_base = OTHER; note = misc_feature - bicyclic nucleic acid scaffold modification
  modified_base 22: mod_base = OTHER; note = misc_feature - bicyclic nucleic acid scaffold modification
  source 1..22: mol_type = other RNA
ttgccgctgcccaatgccatcc

SEQ ID NO: 3232 - RNA, 22 nt, synthetic construct
  modified_base 1: mod_base = OTHER; note = thymine
  misc_feature 1..22: note = Antisense oligonucleotide
  modified_base 1: mod_base = OTHER; note = misc_feature - bicyclic nucleic acid scaffold modification
  modified_base 6: mod_base = OTHER; note = misc_feature - bicyclic nucleic acid scaffold modification
  modified_base 22: mod_base = OTHER; note = misc_feature - bicyclic nucleic acid scaffold modification
  source 1..22: mol_type = other RNA
ttgccgctgcccaatgccatcc

SEQ ID NO: 3233 - RNA, 22 nt, synthetic construct
  modified_base 1: mod_base = OTHER; note = thymine
  misc_feature 1..22: note = Antisense oligonucleotide
  modified_base 1: mod_base = OTHER; note = misc_feature - bicyclic nucleic acid scaffold modification
  modified_base 3: mod_base = OTHER; note = misc_feature - bicyclic nucleic acid scaffold modification
  modified_base 22: mod_base = OTHER; note = misc_feature - bicyclic nucleic acid scaffold modification
  source 1..22: mol_type = other RNA
ttgccgctgcccaatgccatcc

SEQ ID NO: 3234 - RNA, 22 nt, synthetic construct
  modified_base 1: mod_base = OTHER; note = thymine
  misc_feature 1..22: note = Antisense oligonucleotide
  modified_base 1: mod_base = OTHER; note = misc_feature - bicyclic nucleic acid scaffold modification
  modified_base 9: mod_base = OTHER; note = misc_feature - bicyclic nucleic acid scaffold modification
  modified_base 22: mod_base = OTHER; note = misc_feature - bicyclic nucleic acid scaffold modification
  source 1..22: mol_type = other RNA
ttgccgctgcccaatgccatcc

SEQ ID NO: 3235 - RNA, 22 nt, synthetic construct
  modified_base 1: mod_base = OTHER; note = thymine
  misc_feature 1..22: note = Antisense oligonucleotide
  modified_base 1: mod_base = OTHER; note = misc_feature - bicyclic nucleic acid scaffold modification
  modified_base 16: mod_base = OTHER; note = misc_feature - bicyclic nucleic acid scaffold modification
  modified_base 22: mod_base = OTHER; note = misc_feature - bicyclic nucleic acid scaffold modification
  source 1..22: mol_type = other RNA
ttgccgctgcccaatgccatcc

SEQ ID NO: 3236 - RNA, 22 nt, synthetic construct
  modified_base 1: mod_base = OTHER; note = thymine
  misc_feature 1..22: note = Antisense oligonucleotide
  modified_base 1: mod_base = OTHER; note = misc_feature - bicyclic nucleic acid scaffold modification
  modified_base 18: mod_base = OTHER; note = misc_feature - bicyclic nucleic acid scaffold modification
  modified_base 22: mod_base = OTHER; note = misc_feature - bicyclic nucleic acid scaffold modification
  source 1..22: mol_type = other RNA
ttgccgctgcccaatgccatcc

SEQ ID NO: 3237 - RNA, 22 nt, synthetic construct
  modified_base 1: mod_base = OTHER; note = thymine
  misc_feature 1..22: note = Antisense oligonucleotide
  modified_base 1: mod_base = OTHER; note = misc_feature - bicyclic nucleic acid scaffold modification
  modified_base 12: mod_base = OTHER; note = misc_feature - bicyclic nucleic acid scaffold modification
  modified_base 22: mod_base = OTHER; note = misc_feature - bicyclic nucleic acid scaffold modification
  source 1..22: mol_type = other RNA
ttgccgctgcccaatgccatcc

SEQ ID NO: 3238 - RNA, 22 nt, synthetic construct
  modified_base 1: mod_base = OTHER; note = thymine
  misc_feature 1..22: note = Antisense oligonucleotide
  modified_base 1: mod_base = OTHER; note = misc_feature - bicyclic nucleic acid scaffold modification
  modified_base 7: mod_base = OTHER; note = misc_feature - bicyclic nucleic acid scaffold modification
  modified_base 22: mod_base = OTHER; note = misc_feature - bicyclic nucleic acid scaffold modification
  source 1..22: mol_type = other RNA
ttgccgctgcccaatgccatcc

SEQ ID NO: 3239 - RNA, 22 nt, synthetic construct
  modified_base 1: mod_base = OTHER; note = thymine
  misc_feature 1..22: note = Antisense oligonucleotide
  modified_base 1: mod_base = OTHER; note = misc_feature - bicyclic nucleic acid scaffold modification
  modified_base 9: mod_base = OTHER; note = misc_feature - bicyclic nucleic acid scaffold modification
  modified_base 16: mod_base = OTHER; note = misc_feature - bicyclic nucleic acid scaffold modification
  modified_base 22: mod_base = OTHER; note = misc_feature - bicyclic nucleic acid scaffold modification
  source 1..22: mol_type = other RNA
ttgccgctgcccaatgccatcc

SEQ ID NO: 3240 - RNA, 22 nt, synthetic construct
  modified_base 1: mod_base = OTHER; note = thymine
  misc_feature 1..22: note = Antisense oligonucleotide
  modified_base 1: mod_base = OTHER; note = misc_feature - bicyclic nucleic acid scaffold modification
  modified_base 3: mod_base = OTHER; note = misc_feature - bicyclic nucleic acid scaffold modification
  modified_base 9: mod_base = OTHER; note = misc_feature - bicyclic nucleic acid scaffold modification
  modified_base 22: mod_base = OTHER; note = misc_feature - bicyclic nucleic acid scaffold modification
  source 1..22: mol_type = other RNA
ttgccgctgcccaatgccatcc

SEQ ID NO: 3241 - RNA, 22 nt, synthetic construct
  modified_base 1: mod_base = OTHER; note = thymine
  misc_feature 1..22: note = Antisense oligonucleotide
  modified_base 1: mod_base = OTHER; note = misc_feature - bicyclic nucleic acid scaffold modification
  modified_base 7: mod_base = OTHER; note = misc_feature - bicyclic nucleic acid scaffold modification
  modified_base 18: mod_base = OTHER; note = misc_feature - bicyclic nucleic acid scaffold modification
  modified_base 22: mod_base = OTHER; note = misc_feature - bicyclic nucleic acid scaffold modification
  source 1..22: mol_type = other RNA
ttgccgctgcccaatgccatcc

SEQ ID NO: 3242 - RNA, 22 nt, synthetic construct
  modified_base 1: mod_base = OTHER; note = thymine
  misc_feature 1..22: note = Antisense oligonucleotide
  modified_base 1: mod_base = OTHER; note = misc_feature - bicyclic nucleic acid scaffold modification
  modified_base 8: mod_base = OTHER; note = misc_feature - bicyclic nucleic acid scaffold modification
  modified_base 18: mod_base = OTHER; note = misc_feature - bicyclic nucleic acid scaffold modification
  modified_base 22: mod_base = OTHER; note = misc_feature - bicyclic nucleic acid scaffold modification
  source 1..22: mol_type = other RNA
ttgccgctgcccaatgccatcc

SEQ ID NO: 3243 - RNA, 22 nt, synthetic construct
  modified_base 1: mod_base = OTHER; note = thymine
  misc_feature 1..22: note = Antisense oligonucleotide
  modified_base 1: mod_base = OTHER; note = misc_feature - bicyclic nucleic acid scaffold modification
  modified_base 12: mod_base = OTHER; note = misc_feature - bicyclic nucleic acid scaffold modification
  modified_base 18: mod_base = OTHER; note = misc_feature - bicyclic nucleic acid scaffold modification
  modified_base 22: mod_base = OTHER; note = misc_feature - bicyclic nucleic acid scaffold modification
  source 1..22: mol_type = other RNA
ttgccgctgcccaatgccatcc

SEQ ID NO: 3244 - RNA, 22 nt, synthetic construct
  modified_base 1: mod_base = OTHER; note = thymine
  misc_feature 1..22: note = Antisense oligonucleotide
  modified_base 1: mod_base = OTHER; note = misc_feature - bicyclic nucleic acid scaffold modification
  modified_base 7: mod_base = OTHER; note = misc_feature - bicyclic nucleic acid scaffold modification
  modified_base 18: mod_base = OTHER; note = misc_feature - bicyclic nucleic acid scaffold modification
  modified_base 22: mod_base = OTHER; note = misc_feature - bicyclic nucleic acid scaffold modification
  source 1..22: mol_type = other RNA
ttgccgctgcccaatgccatcc

SEQ ID NO: 3245 - RNA, 22 nt, synthetic construct
  modified_base 1..2: mod_base = OTHER; note = thymine
  misc_feature 1..22: note = Antisense oligonucleotide
  modified_base 1..2: mod_base = OTHER; note = misc_feature - bicyclic nucleic acid scaffold modification
  modified_base 21..22: mod_base = OTHER; note = misc_feature - bicyclic nucleic acid scaffold modification
  source 1..22: mol_type = other RNA
ttgccgctgcccaatgccatcc

SEQ ID NO: 3246 - RNA, 22 nt, synthetic construct
  modified_base 1: mod_base = OTHER; note = thymine
  misc_feature 1..22: note = Antisense oligonucleotide
  modified_base 1: mod_base = OTHER; note = misc_feature - bicyclic nucleic acid scaffold modification
  modified_base 12: mod_base = OTHER; note = misc_feature - bicyclic nucleic acid scaffold modification
  modified_base 21..22: mod_base = OTHER; note = misc_feature - bicyclic nucleic acid scaffold modification
  source 1..22: mol_type = other RNA
ttgccgctgcccaatgccatcc

SEQ ID NO: 3247 - RNA, 22 nt, synthetic construct
  modified_base 1: mod_base = OTHER; note = thymine
  modified_base 22: mod_base = OTHER; note = thymine
  misc_feature 1..22: note = Antisense oligonucleotide
  modified_base 1: mod_base = OTHER; note = misc_feature - bicyclic nucleic acid scaffold modification
  modified_base 22: mod_base = OTHER; note = misc_feature - bicyclic nucleic acid scaffold modification
  source 1..22: mol_type = other RNA
tgccgctgcccaatgccatcct

SEQ ID NO: 3248 - RNA, 22 nt, synthetic construct
  modified_base 1: mod_base = OTHER; note = thymine
  modified_base 22: mod_base = OTHER; note = thymine
  misc_feature 1..22: note = Antisense oligonucleotide
  modified_base 1..2: mod_base = OTHER; note = misc_feature - bicyclic nucleic acid scaffold modification
  modified_base 22: mod_base = OTHER; note = misc_feature - bicyclic nucleic acid scaffold modification
  source 1..22: mol_type = other RNA
tgccgctgcccaatgccatcct

SEQ ID NO: 3249 - RNA, 22 nt, synthetic construct
  modified_base 1: mod_base = OTHER; note = thymine
  modified_base 22: mod_base = OTHER; note = thymine
  misc_feature 1..22: note = Antisense oligonucleotide
  modified_base 1: mod_base = OTHER; note = misc_feature - bicyclic nucleic acid scaffold modification
  modified_base 5: mod_base = OTHER; note = misc_feature - bicyclic nucleic acid scaffold modification
  modified_base 22: mod_base = OTHER; note = misc_feature - bicyclic nucleic acid scaffold modification
  source 1..22: mol_type = other RNA
tgccgctgcccaatgccatcct

SEQ ID NO: 3250 - RNA, 22 nt, synthetic construct
  modified_base 1: mod_base = OTHER; note = thymine
  modified_base 22: mod_base = OTHER; note = thymine
  misc_feature 1..22: note = Antisense oligonucleotide
  modified_base 1: mod_base = OTHER; note = misc_feature - bicyclic nucleic acid scaffold modification
  modified_base 8: mod_base = OTHER; note = misc_feature - bicyclic nucleic acid scaffold modification
  modified_base 22: mod_base = OTHER; note = misc_feature - bicyclic nucleic acid scaffold modification
  source 1..22: mol_type = other RNA
tgccgctgcccaatgccatcct

SEQ ID NO: 3251 - RNA, 22 nt, synthetic construct
  modified_base 1: mod_base = OTHER; note = thymine
  modified_base 22: mod_base = OTHER; note = thymine
  misc_feature 1..22: note = Antisense oligonucleotide
  modified_base 1: mod_base = OTHER; note = misc_feature - bicyclic nucleic acid scaffold modification
  modified_base 15: mod_base = OTHER; note = misc_feature - bicyclic nucleic acid scaffold modification
  modified_base 22: mod_base = OTHER; note = misc_feature - bicyclic nucleic acid scaffold modification
  source 1..22: mol_type = other RNA
tgccgctgcccaatgccatcct

SEQ ID NO: 3252 - RNA, 22 nt, synthetic construct
  modified_base 1: mod_base = OTHER; note = thymine
  modified_base 22: mod_base = OTHER; note = thymine
  misc_feature 1..22: note = Antisense oligonucleotide
  modified_base 1: mod_base = OTHER; note = misc_feature - bicyclic nucleic acid scaffold modification
  modified_base 20: mod_base = OTHER; note = misc_feature - bicyclic nucleic acid scaffold modification
  modified_base 22: mod_base = OTHER; note = misc_feature - bicyclic nucleic acid scaffold modification
  source 1..22: mol_type = other RNA
tgccgctgcccaatgccatcct

SEQ ID NO: 3253 - RNA, 22 nt, synthetic construct
  modified_base 1: mod_base = OTHER; note = thymine
  modified_base 22: mod_base = OTHER; note = thymine
  misc_feature 1..22: note = Antisense oligonucleotide
  modified_base 1: mod_base = OTHER; note = misc_feature - bicyclic nucleic acid scaffold modification
  modified_base 17: mod_base = OTHER; note = misc_feature - bicyclic nucleic acid scaffold modification
  modified_base 22: mod_base = OTHER; note = misc_feature - bicyclic nucleic acid scaffold modification
  source 1..22: mol_type = other RNA
tgccgctgcccaatgccatcct

SEQ ID NO: 3254 - RNA, 22 nt, synthetic construct
  modified_base 1: mod_base = OTHER; note = thymine
  modified_base 22: mod_base = OTHER; note = thymine
  misc_feature 1..22: note = Antisense oligonucleotide
  modified_base 1: mod_base = OTHER; note = misc_feature - bicyclic nucleic acid scaffold modification
  modified_base 11: mod_base = OTHER; note = misc_feature - bicyclic nucleic acid scaffold modification
  modified_base 22: mod_base = OTHER; note = misc_feature - bicyclic nucleic acid scaffold modification
  source 1..22: mol_type = other RNA
tgccgctgcccaatgccatcct

SEQ ID NO: 3255 - RNA, 22 nt, synthetic construct
  modified_base 1: mod_base = OTHER; note = thymine
  modified_base 22: mod_base = OTHER; note = thymine
  misc_feature 1..22: note = Antisense oligonucleotide
  modified_base 1: mod_base = OTHER; note = misc_feature - bicyclic nucleic acid scaffold modification
  modified_base 6: mod_base = OTHER; note = misc_feature - bicyclic nucleic acid scaffold modification
  modified_base 22: mod_base = OTHER; note = misc_feature - bicyclic nucleic acid scaffold modification
  source 1..22: mol_type = other RNA
tgccgctgcccaatgccatcct

SEQ ID NO: 3256 - RNA, 22 nt, synthetic construct
  modified_base 1: mod_base = OTHER; note = thymine
  modified_base 22: mod_base = OTHER; note = thymine
  misc_feature 1..22: note = Antisense oligonucleotide
  modified_base 1: mod_base = OTHER; note = misc_feature - bicyclic nucleic acid scaffold modification
  modified_base 8: mod_base = OTHER; note = misc_feature - bicyclic nucleic acid scaffold modification
  modified_base 15: mod_base = OTHER; note = misc_feature - bicyclic nucleic acid scaffold modification
  modified_base 22: mod_base = OTHER; note = misc_feature - bicyclic nucleic acid scaffold modification
  source 1..22: mol_type = other RNA
tgccgctgcccaatgccatcct

SEQ ID NO: 3257 - RNA, 22 nt, synthetic construct
  modified_base 1: mod_base = OTHER; note = thymine
  modified_base 22: mod_base = OTHER; note = thymine
  misc_feature 1..22: note = Antisense oligonucleotide
  modified_base 1: mod_base = OTHER; note = misc_feature - bicyclic nucleic acid scaffold modification
  modified_base 5: mod_base = OTHER; note = misc_feature - bicyclic nucleic acid scaffold modification
  modified_base 15: mod_base = OTHER; note = misc_feature - bicyclic nucleic acid scaffold modification
  modified_base 22: mod_base = OTHER; note = misc_feature - bicyclic nucleic acid scaffold modification
  source 1..22: mol_type = other RNA
tgccgctgcccaatgccatcct

SEQ ID NO: 3258 - RNA, 22 nt, synthetic construct
  modified_base 1: mod_base = OTHER; note = thymine
  modified_base 22: mod_base = OTHER; note = thymine
  misc_feature 1..22: note = Antisense oligonucleotide
  modified_base 1: mod_base = OTHER; note = misc_feature - bicyclic nucleic acid scaffold modification
  modified_base 11: mod_base = OTHER; note = misc_feature - bicyclic nucleic acid scaffold modification
  modified_base 17: mod_base = OTHER; note = misc_feature - bicyclic nucleic acid scaffold modification
  modified_base 22: mod_base = OTHER; note = misc_feature - bicyclic nucleic acid scaffold modification
  source 1..22: mol_type = other RNA
tgccgctgcccaatgccatcct

SEQ ID NO: 3259 - RNA, 22 nt, synthetic construct
  modified_base 1: mod_base = OTHER; note = thymine
  modified_base 22: mod_base = OTHER; note = thymine
  misc_feature 1..22: note = Antisense oligonucleotide
  modified_base 1: mod_base = OTHER; note = misc_feature - bicyclic nucleic acid scaffold modification
  modified_base 6: mod_base = OTHER; note = misc_feature - bicyclic nucleic acid scaffold modification
  modified_base 17: mod_base = OTHER; note = misc_feature - bicyclic nucleic acid scaffold modification
  modified_base 22: mod_base = OTHER; note = misc_feature - bicyclic nucleic acid scaffold modification
  source 1..22: mol_type = other RNA
tgccgctgcccaatgccatcct

SEQ ID NO: 3260 - RNA, 22 nt, synthetic construct
  modified_base 1: mod_base = OTHER; note = thymine
  modified_base 22: mod_base = OTHER; note = thymine
  misc_feature 1..22: note = Antisense oligonucleotide
  modified_base 1: mod_base = OTHER; note = misc_feature - bicyclic nucleic acid scaffold modification
  modified_base 6: mod_base = OTHER; note = misc_feature - bicyclic nucleic acid scaffold modification
  modified_base 11: mod_base = OTHER; note = misc_feature - bicyclic nucleic acid scaffold modification
  modified_base 17: mod_base = OTHER; note = misc_feature - bicyclic nucleic acid scaffold modification
  modified_base 22: mod_base = OTHER; note = misc_feature - bicyclic nucleic acid scaffold modification
  source 1..22: mol_type = other RNA
tgccgctgcccaatgccatcct

SEQ ID NO: 3261 - RNA, 22 nt, synthetic construct
  modified_base 1: mod_base = OTHER; note = thymine
  modified_base 22: mod_base = OTHER; note = thymine
  misc_feature 1..22: note = Antisense oligonucleotide
  modified_base 1..2: mod_base = OTHER; note = misc_feature - bicyclic nucleic acid scaffold modification
  modified_base 21..22: mod_base = OTHER; note = misc_feature - bicyclic nucleic acid scaffold modification
  source 1..22: mol_type = other RNA
tgccgctgcccaatgccatcct

SEQ ID NO: 3262 - RNA, 22 nt, synthetic construct
  modified_base 1: mod_base = OTHER; note = thymine
  modified_base 22: mod_base = OTHER; note = thymine
  misc_feature 1..22: note = Antisense oligonucleotide
  modified_base 1..2: mod_base = OTHER; note = misc_feature - bicyclic nucleic acid scaffold modification
  modified_base 8: mod_base = OTHER; note = misc_feature - bicyclic nucleic acid scaffold modification
  modified_base 15: mod_base = OTHER; note = misc_feature - bicyclic nucleic acid scaffold modification
  modified_base 21..22: mod_base = OTHER; note = misc_feature - bicyclic nucleic acid scaffold modification
  source 1..22: mol_type = other RNA
tgccgctgcccaatgccatcct

SEQ ID NO: 3263 - RNA, 20 nt, synthetic construct
  modified_base 1: mod_base = OTHER; note = thymine
  misc_feature 1..20: note = Antisense oligonucleotide
  modified_base 1: mod_base = OTHER; note = misc_feature - bicyclic nucleic acid scaffold modification
  modified_base 20: mod_base = OTHER; note = misc_feature - bicyclic nucleic acid scaffold modification
  source 1..20: mol_type = other RNA
tttgccgctgcccaatgcca

SEQ ID NO: 3264 - RNA, 20 nt, synthetic construct
  modified_base 1: mod_base = OTHER; note = thymine
  misc_feature 1..20: note = Antisense oligonucleotide
  modified_base 1: mod_base = OTHER; note = misc_feature - bicyclic nucleic acid scaffold modification
  modified_base 4: mod_base = OTHER; note = misc_feature - bicyclic nucleic acid scaffold modification
  modified_base 20: mod_base = OTHER; note = misc_feature - bicyclic nucleic acid scaffold modification
  source 1..20: mol_type = other RNA
tttgccgctgcccaatgcca

SEQ ID NO: 3265 - RNA, 20 nt, synthetic construct
  modified_base 1: mod_base = OTHER; note = thymine
  misc_feature 1..20: note = Antisense oligonucleotide
  modified_base 1: mod_base = OTHER; note = misc_feature - bicyclic nucleic acid scaffold modification
  modified_base 7: mod_base = OTHER; note = misc_feature - bicyclic nucleic acid scaffold modification
  modified_base 20: mod_base = OTHER; note = misc_feature - bicyclic nucleic acid scaffold modification
  source 1..20: mol_type = other RNA
tttgccgctgcccaatgcca

SEQ ID NO: 3266 - RNA, 20 nt, synthetic construct
  modified_base 1: mod_base = OTHER; note = thymine
  misc_feature 1..20: note = Antisense oligonucleotide
  modified_base 1: mod_base = OTHER; note = misc_feature - bicyclic nucleic acid scaffold modification
  modified_base 10: mod_base = OTHER; note = misc_feature - bicyclic nucleic acid scaffold modification
  modified_base 20: mod_base = OTHER; note = misc_feature - bicyclic nucleic acid scaffold modification
  source 1..20: mol_type = other RNA
tttgccgctgcccaatgcca

SEQ ID NO: 3267 - RNA, 20 nt, synthetic construct
  modified_base 1: mod_base = OTHER; note = thymine
  misc_feature 1..20: note = Antisense oligonucleotide
  modified_base 1: mod_base = OTHER; note = misc_feature - bicyclic nucleic acid scaffold modification
  modified_base 17: mod_base = OTHER; note = misc_feature - bicyclic nucleic acid scaffold modification
  modified_base 20: mod_base = OTHER; note = misc_feature - bicyclic nucleic acid scaffold modification
  source 1..20: mol_type = other RNA
tttgccgctgcccaatgcca

SEQ ID NO: 3268 - RNA, 20 nt, synthetic construct
  modified_base 1: mod_base = OTHER; note = thymine
  misc_feature 1..20: note = Antisense oligonucleotide
  modified_base 1: mod_base = OTHER; note = misc_feature - bicyclic nucleic acid scaffold modification
  modified_base 8: mod_base = OTHER; note = misc_feature - bicyclic nucleic acid scaffold modification
  modified_base 20: mod_base = OTHER; note = misc_feature - bicyclic nucleic acid scaffold modification
  source 1..20: mol_type = other RNA
tttgccgctgcccaatgcca

SEQ ID NO: 3269 - RNA, 20 nt, synthetic construct
  modified_base 1: mod_base = OTHER; note = thymine
  misc_feature 1..20: note = Antisense oligonucleotide
  modified_base 1: mod_base = OTHER; note = misc_feature - bicyclic nucleic acid scaffold modification
  modified_base 13: mod_base = OTHER; note = misc_feature - bicyclic nucleic acid scaffold modification
  modified_base 20: mod_base = OTHER; note = misc_feature - bicyclic nucleic acid scaffold modification
  source 1..20: mol_type = other RNA
tttgccgctgcccaatgcca

SEQ ID NO: 3270 - RNA, 20 nt, synthetic construct
  modified_base 1: mod_base = OTHER; note = thymine
  misc_feature 1..20: note = Antisense oligonucleotide
  modified_base 1: mod_base = OTHER; note = misc_feature - bicyclic nucleic acid scaffold modification
  modified_base 19..20: mod_base = OTHER; note = misc_feature - bicyclic nucleic acid scaffold modification
  source 1..20: mol_type = other RNA
tttgccgctgcccaatgcca

SEQ ID NO: 3271 - RNA, 20 nt, synthetic construct
  modified_base 1: mod_base = OTHER; note = thymine
  misc_feature 1..20: note = Antisense oligonucleotide
  modified_base 1: mod_base = OTHER; note = misc_feature - bicyclic nucleic acid scaffold modification
  modified_base 6: mod_base = OTHER; note = misc_feature - bicyclic nucleic acid scaffold modification
  modified_base 20: mod_base = OTHER; note = misc_feature - bicyclic nucleic acid scaffold modification
  source 1..20: mol_type = other RNA
tttgccgctgcccaatgcca

SEQ ID NO: 3272 - RNA, 20 nt, synthetic construct
  modified_base 1: mod_base = OTHER; note = thymine
  misc_feature 1..20: note = Antisense oligonucleotide
  modified_base 1: mod_base = OTHER; note = misc_feature - bicyclic nucleic acid scaffold modification
  modified_base 10: mod_base = OTHER; note = misc_feature - bicyclic nucleic acid scaffold modification
  modified_base 17: mod_base = OTHER; note = misc_feature - bicyclic nucleic acid scaffold modification
  modified_base 20: mod_base = OTHER; note = misc_feature - bicyclic nucleic acid scaffold modification
  source 1..20: mol_type = other RNA
tttgccgctgcccaatgcca

SEQ ID NO: 3273 - RNA, 20 nt, synthetic construct
  modified_base 1: mod_base = OTHER; note = thymine
  misc_feature 1..20: note = Antisense oligonucleotide
  modified_base 1: mod_base = OTHER; note = misc_feature - bicyclic nucleic acid scaffold modification
  modified_base 4: mod_base = OTHER; note = misc_feature - bicyclic nucleic acid scaffold modification
  modified_base 17: mod_base = OTHER; note = misc_feature - bicyclic nucleic acid scaffold modification
  modified_base 20: mod_base = OTHER; note = misc_feature - bicyclic nucleic acid scaffold modification
  source 1..20: mol_type = other RNA
tttgccgctgcccaatgcca

SEQ ID NO: 3274 - RNA, 20 nt, synthetic construct
  modified_base 1: mod_base = OTHER; note = thymine
  misc_feature 1..20: note = Antisense oligonucleotide
  modified_base 1: mod_base = OTHER; note = misc_feature - bicyclic nucleic acid scaffold modification
  modified_base 8: mod_base = OTHER; note = misc_feature - bicyclic nucleic acid scaffold modification
  modified_base 13: mod_base = OTHER; note = misc_feature - bicyclic nucleic acid scaffold modification
  modified_base 20: mod_base = OTHER; note = misc_feature - bicyclic nucleic acid scaffold modification
  source 1..20: mol_type = other RNA
tttgccgctgcccaatgcca

SEQ ID NO: 3275 - RNA, 20 nt, synthetic construct
  modified_base 1: mod_base = OTHER; note = thymine
  misc_feature 1..20: note = Antisense oligonucleotide
  modified_base 1: mod_base = OTHER; note = misc_feature - bicyclic nucleic acid scaffold modification
  modified_base 6: mod_base = OTHER; note = misc_feature - bicyclic nucleic acid scaffold modification
  modified_base 18: mod_base = OTHER; note = misc_feature - bicyclic nucleic acid scaffold modification
  modified_base 20: mod_base = OTHER; note = misc_feature - bicyclic nucleic acid scaffold modification
  source 1..20: mol_type = other RNA
tttgccgctgcccaatgcca

SEQ ID NO: 3276 - RNA, 20 nt, synthetic construct
  modified_base 1..2: mod_base = OTHER; note = thymine
  misc_feature 1..20: note = Antisense oligonucleotide
  modified_base 1..2: mod_base = OTHER; note = misc_feature - bicyclic nucleic acid scaffold modification
  modified_base 19..20: mod_base = OTHER; note = misc_feature - bicyclic nucleic acid scaffold modification
  source 1..20: mol_type = other RNA
tttgccgctgcccaatgcca

SEQ ID NO: 3277 - RNA, 20 nt, synthetic construct
  modified_base 1..2: mod_base = OTHER; note = thymine
  misc_feature 1..20: note = Antisense oligonucleotide
  modified_base 1..2: mod_base = OTHER; note = misc_feature - bicyclic nucleic acid scaffold modification
  modified_base 10: mod_base = OTHER; note = misc_feature - bicyclic nucleic acid scaffold modification
  modified_base 19..20: mod_base = OTHER; note = misc_feature - bicyclic nucleic acid scaffold modification
  source 1..20: mol_type = other RNA
tttgccgctgcccaatgcca

SEQ ID NO: 3278 - RNA, 20 nt, synthetic construct
  modified_base 1: mod_base = OTHER; note = thymine
  modified_base 20: mod_base = OTHER; note = thymine
  misc_feature 1..20: note = Antisense oligonucleotide
  modified_base 1: mod_base = OTHER; note = misc_feature - bicyclic nucleic acid scaffold modification
  modified_base 20: mod_base = OTHER; note = misc_feature - bicyclic nucleic acid scaffold modification
  source 1..20: mol_type = other RNA
ttgccgctgcccaatgccat

SEQ ID NO: 3279 - RNA, 20 nt, synthetic construct
  modified_base 1: mod_base = OTHER; note = thymine
  modified_base 20: mod_base = OTHER; note = thymine
  misc_feature 1..20: note = Antisense oligonucleotide
  modified_base 1: mod_base = OTHER; note = misc_feature - bicyclic nucleic acid scaffold modification
  modified_base 3: mod_base = OTHER; note = misc_feature - bicyclic nucleic acid scaffold modification
  modified_base 20: mod_base = OTHER; note = misc_feature - bicyclic nucleic acid scaffold modification
  source 1..20: mol_type = other RNA
ttgccgctgcccaatgccat

SEQ ID NO: 3280 - RNA, 20 nt, synthetic construct
  modified_base 1: mod_base = OTHER; note = thymine
  modified_base 20: mod_base = OTHER; note = thymine
  misc_feature 1..20: note = Antisense oligonucleotide
  modified_base 1: mod_base = OTHER; note = misc_feature - bicyclic nucleic acid scaffold modification
  modified_base 6: mod_base = OTHER; note = misc_feature - bicyclic nucleic acid scaffold modification
  modified_base 20: mod_base = OTHER; note = misc_feature - bicyclic nucleic acid scaffold modification
  source 1..20: mol_type = other RNA
ttgccgctgcccaatgccat

SEQ ID NO: 3281 - RNA, 20 nt, synthetic construct
  modified_base 1: mod_base = OTHER; note = thymine
  modified_base 20: mod_base = OTHER; note = thymine
  misc_feature 1..20: note = Antisense oligonucleotide
  modified_base 1: mod_base = OTHER; note = misc_feature - bicyclic nucleic acid scaffold modification
  modified_base 9: mod_base = OTHER; note = misc_feature - bicyclic nucleic acid scaffold modification
  modified_base 20: mod_base = OTHER; note = misc_feature - bicyclic nucleic acid scaffold modification
  source 1..20: mol_type = other RNA
ttgccgctgcccaatgccat

SEQ ID NO: 3282 - RNA, 20 nt, synthetic construct
  modified_base 1: mod_base = OTHER; note = thymine
  modified_base 20: mod_base = OTHER; note = thymine
  misc_feature 1..20: note = Antisense oligonucleotide
  modified_base 1: mod_base = OTHER; note = misc_feature - bicyclic nucleic acid scaffold modification
  modified_base 16: mod_base = OTHER; note = misc_feature - bicyclic nucleic acid scaffold modification
  modified_base 20: mod_base = OTHER; note = misc_feature - bicyclic nucleic acid scaffold modification
  source 1..20: mol_type = other RNA
ttgccgctgcccaatgccat

SEQ ID NO: 3283 - RNA, 20 nt, synthetic construct
  modified_base 1: mod_base = OTHER; note = thymine
  modified_base 20: mod_base = OTHER; note = thymine
  misc_feature 1..20: note = Antisense oligonucleotide
  modified_base 1: mod_base = OTHER; note = misc_feature - bicyclic nucleic acid scaffold modification
  modified_base 7: mod_base = OTHER; note = misc_feature - bicyclic nucleic acid scaffold modification
  modified_base 20: mod_base = OTHER; note = misc_feature - bicyclic nucleic acid scaffold modification
  source 1..20: mol_type = other RNA
ttgccgctgcccaatgccat

SEQ ID NO: 3284 - RNA, 20 nt, synthetic construct
  modified_base 1: mod_base = OTHER; note = thymine
  modified_base 20: mod_base = OTHER; note = thymine
  misc_feature 1..20: note = Antisense oligonucleotide
  modified_base 1: mod_base = OTHER; note = misc_feature - bicyclic nucleic acid scaffold modification
  modified_base 12: mod_base = OTHER; note = misc_feature - bicyclic nucleic acid scaffold modification
  modified_base 20: mod_base = OTHER; note = misc_feature - bicyclic nucleic acid scaffold modification
  source 1..20: mol_type = other RNA
ttgccgctgcccaatgccat

SEQ ID NO: 3285 - RNA, 20 nt, synthetic construct
  modified_base 1: mod_base = OTHER; note = thymine
  modified_base 20: mod_base = OTHER; note = thymine
  misc_feature 1..20: note = Antisense oligonucleotide
  modified_base 1: mod_base = OTHER; note = misc_feature - bicyclic nucleic acid scaffold modification
  modified_base 18: mod_base = OTHER; note = misc_feature - bicyclic nucleic acid scaffold modification
  modified_base 20: mod_base = OTHER; note = misc_feature - bicyclic nucleic acid scaffold modification
  source 1..20: mol_type = other RNA
ttgccgctgcccaatgccat

SEQ ID NO: 3286 - RNA, 20 nt, synthetic construct
  modified_base 1: mod_base = OTHER; note = thymine
  modified_base 20: mod_base = OTHER; note = thymine
  misc_feature 1..20: note = Antisense oligonucleotide
  modified_base 1: mod_base = OTHER; note = misc_feature - bicyclic nucleic acid scaffold modification
  modified_base 9: mod_base = OTHER; note = misc_feature - bicyclic nucleic acid scaffold modification
  modified_base 16: mod_base = OTHER; note = misc_feature - bicyclic nucleic acid scaffold modification
  modified_base 20: mod_base = OTHER; note = misc_feature - bicyclic nucleic acid scaffold modification
  source 1..20: mol_type = other RNA
ttgccgctgcccaatgccat

SEQ ID NO: 3287 - RNA, 20 nt, synthetic construct
  modified_base 1: mod_base = OTHER; note = thymine
  modified_base 20: mod_base = OTHER; note = thymine
  misc_feature 1..20: note = Antisense oligonucleotide
  modified_base 1: mod_base = OTHER; note = misc_feature - bicyclic nucleic acid scaffold modification
  modified_base 3: mod_base = OTHER; note = misc_feature - bicyclic nucleic acid scaffold modification
  modified_base 9: mod_base = OTHER; note = misc_feature - bicyclic nucleic acid scaffold modification
  modified_base 20: mod_base = OTHER; note = misc_feature - bicyclic nucleic acid scaffold modification
  source 1..20: mol_type = other RNA
ttgccgctgcccaatgccat

SEQ ID NO: 3288 - RNA, 20 nt, synthetic construct
  modified_base 1: mod_base = OTHER; note = thymine
  modified_base 20: mod_base = OTHER; note = thymine
  misc_feature 1..20: note = Antisense oligonucleotide
  modified_base 1: mod_base = OTHER; note = misc_feature - bicyclic nucleic acid scaffold modification
  modified_base 3: mod_base = OTHER; note = misc_feature - bicyclic nucleic acid scaffold modification
  modified_base 16: mod_base = OTHER; note = misc_feature - bicyclic nucleic acid scaffold modification
  modified_base 20: mod_base = OTHER; note = misc_feature - bicyclic nucleic acid scaffold modification
  source 1..20: mol_type = other RNA
ttgccgctgcccaatgccat

SEQ ID NO: 3289 - RNA, 20 nt, synthetic construct
  modified_base 1: mod_base = OTHER; note = thymine
  modified_base 20: mod_base = OTHER; note = thymine
  misc_feature 1..20: note = Antisense oligonucleotide
  modified_base 1: mod_base = OTHER; note = misc_feature - bicyclic nucleic acid scaffold modification
  modified_base 7: mod_base = OTHER; note = misc_feature - bicyclic nucleic acid scaffold modification
  modified_base 12: mod_base = OTHER; note = misc_feature - bicyclic nucleic acid scaffold modification
  modified_base 20: mod_base = OTHER; note = misc_feature - bicyclic nucleic acid scaffold modification
  source 1..20: mol_type = other RNA
ttgccgctgcccaatgccat

SEQ ID NO: 3290 - RNA, 20 nt, synthetic construct
  modified_base 1: mod_base = OTHER; note = thymine
  modified_base 20: mod_base = OTHER; note = thymine
  misc_feature 1..20: note = Antisense oligonucleotide
  modified_base 1: mod_base = OTHER; note = misc_feature - bicyclic nucleic acid scaffold modification
  modified_base 7: mod_base = OTHER; note = misc_feature - bicyclic nucleic acid scaffold modification
  modified_base 18: mod_base = OTHER; note = misc_feature - bicyclic nucleic acid scaffold modification
  modified_base 20: mod_base = OTHER; note = misc_feature - bicyclic nucleic acid scaffold modification
  source 1..20: mol_type = other RNA
ttgccgctgcccaatgccat

SEQ ID NO: 3291 - RNA, 20 nt, synthetic construct
  modified_base 1: mod_base = OTHER; note = thymine
  modified_base 20: mod_base = OTHER; note = thymine
  misc_feature 1..20: note = Antisense oligonucleotide
  modified_base 1: mod_base = OTHER; note = misc_feature - bicyclic nucleic acid scaffold modification
  modified_base 7: mod_base = OTHER; note = misc_feature - bicyclic nucleic acid scaffold modification
  modified_base 12: mod_base = OTHER; note = misc_feature - bicyclic nucleic acid scaffold modification
  modified_base 18: mod_base = OTHER; note = misc_feature - bicyclic nucleic acid scaffold modification
  modified_base 20: mod_base = OTHER; note = misc_feature - bicyclic nucleic acid scaffold modification
  source 1..20: mol_type = other RNA
ttgccgctgcccaatgccat

SEQ ID NO: 3292 - RNA, 20 nt, synthetic construct
  modified_base 1..2: mod_base = OTHER; note = thymine
  modified_base 20: mod_base = OTHER; note = thymine
  misc_feature 1..20: note = Antisense oligonucleotide
  modified_base 1..2: mod_base = OTHER; note = misc_feature - bicyclic nucleic acid scaffold modification
  modified_base 19..20: mod_base = OTHER; note = misc_feature - bicyclic nucleic acid scaffold modification
  source 1..20: mol_type = other RNA
ttgccgctgcccaatgccat

SEQ ID NO: 3293 - RNA, 20 nt, synthetic construct
  modified_base 1: mod_base = OTHER; note = thymine
  modified_base 20: mod_base = OTHER; note = thymine
  misc_feature 1..20: note = Antisense oligonucleotide
  modified_base 1..2: mod_base = OTHER; note = misc_feature - bicyclic nucleic acid scaffold modification
  modified_base 9: mod_base = OTHER; note = misc_feature - bicyclic nucleic acid scaffold modification
  modified_base 16: mod_base = OTHER; note = misc_feature - bicyclic nucleic acid scaffold modification
  modified_base 19..20: mod_base = OTHER; note = misc_feature - bicyclic nucleic acid scaffold modification
  source 1..20: mol_type = other RNA
ttgccgctgcccaatgccat

SEQ ID NO: 3294 - RNA, 20 nt, synthetic construct
  modified_base 1: mod_base = OTHER; note = thymine
  misc_feature 1..20: note = Antisense oligonucleotide
  modified_base 1: mod_base = OTHER; note = misc_feature - bicyclic nucleic acid scaffold modification
  modified_base 20: mod_base = OTHER; note = misc_feature - bicyclic nucleic acid scaffold modification
  source 1..20: mol_type = other RNA
tgccgctgcccaatgccatc

SEQ ID NO: 3295 - RNA, 20 nt, synthetic construct
  modified_base 1: mod_base = OTHER; note = thymine
  misc_feature 1..20: note = Antisense oligonucleotide
  modified_base 1: mod_base = OTHER; note = misc_feature - bicyclic nucleic acid scaffold modification
  modified_base 17: mod_base = OTHER; note = misc_feature - bicyclic nucleic acid scaffold modification
  modified_base 20: mod_base = OTHER; note = misc_feature - bicyclic nucleic acid scaffold modification
  source 1..20: mol_type = other RNA
tgccgctgcccaatgccatc

SEQ ID NO: 3296 - RNA, 20 nt, synthetic construct
  modified_base 1: mod_base = OTHER; note = thymine
  misc_feature 1..20: note = Antisense oligonucleotide
  modified_base 1: mod_base = OTHER; note = misc_feature - bicyclic nucleic acid scaffold modification
  modified_base 11: mod_base = OTHER; note = misc_feature - bicyclic nucleic acid scaffold modification
  modified_base 20: mod_base = OTHER; note = misc_feature - bicyclic nucleic acid scaffold modification
  source 1..20: mol_type = other RNA
tgccgctgcccaatgccatc

SEQ ID NO: 3297 - RNA, 20 nt, synthetic construct
  modified_base 1: mod_base = OTHER; note = thymine
  misc_feature 1..20: note = Antisense oligonucleotide
  modified_base 1: mod_base = OTHER; note = misc_feature - bicyclic nucleic acid scaffold modification
  modified_base 6: mod_base = OTHER; note = misc_feature - bicyclic nucleic acid scaffold modification
  modified_base 20: mod_base = OTHER; note = misc_feature - bicyclic nucleic acid scaffold modification
  source 1..20: mol_type = other RNA
tgccgctgcccaatgccatc

SEQ ID NO: 3298 - RNA, 20 nt, synthetic construct
  modified_base 1: mod_base = OTHER; note = thymine
  misc_feature 1..20: note = Antisense oligonucleotide
  modified_base 1..2: mod_base = OTHER; note = misc_feature - bicyclic nucleic acid scaffold modification
  modified_base 20: mod_base = OTHER; note = misc_feature - bicyclic nucleic acid scaffold modification
  source 1..20: mol_type = other RNA
tgccgctgcccaatgccatc

SEQ ID NO: 3299 - RNA, 20 nt, synthetic construct
  modified_base 1: mod_base = OTHER; note = thymine
  misc_feature 1..20: note = Antisense oligonucleotide
  modified_base 1: mod_base = OTHER; note = misc_feature - bicyclic nucleic acid scaffold modification
  modified_base 5: mod_base = OTHER; note = misc_feature - bicyclic nucleic acid scaffold modification
  modified_base 20: mod_base = OTHER; note = misc_feature - bicyclic nucleic acid scaffold modification
  source 1..20: mol_type = other RNA
tgccgctgcccaatgccatc

SEQ ID NO: 3300 - RNA, 20 nt, synthetic construct
  modified_base 1: mod_base = OTHER; note = thymine
  misc_feature 1..20: note = Antisense oligonucleotide
  modified_base 1: mod_base = OTHER; note = misc_feature - bicyclic nucleic acid scaffold modification
  modified_base 8: mod_base = OTHER; note = misc_feature - bicyclic nucleic acid scaffold modification
  modified_base 20: mod_base = OTHER; note = misc_feature - bicyclic nucleic acid scaffold modification
  source 1..20: mol_type = other RNA
tgccgctgcccaatgccatc

SEQ ID NO: 3301 - RNA, 20 nt, synthetic construct
  modified_base 1: mod_base = OTHER; note = thymine
  misc_feature 1..20: note = Antisense oligonucleotide
  modified_base 1: mod_base = OTHER; note = misc_feature - bicyclic nucleic acid scaffold modification
  modified_base 15: mod_base = OTHER; note = misc_feature - bicyclic nucleic acid scaffold modification
  modified_base 20: mod_base = OTHER; note = misc_feature - bicyclic nucleic acid scaffold modification
  source 1..20: mol_type = other RNA
tgccgctgcccaatgccatc

SEQ ID NO: 3302 - RNA, 20 nt, synthetic construct
  modified_base 1: mod_base = OTHER; note = thymine
  misc_feature 1..20: note = Antisense oligonucleotide
  modified_base 1: mod_base = OTHER; note = misc_feature - bicyclic nucleic acid scaffold modification
  modified_base 8: mod_base = OTHER; note = misc_feature - bicyclic nucleic acid scaffold modification
  modified_base 15: mod_base = OTHER; note = misc_feature - bicyclic nucleic acid scaffold modification
  modified_base 20: mod_base = OTHER; note = misc_feature - bicyclic nucleic acid scaffold modification
  source 1..20: mol_type = other RNA
tgccgctgcccaatgccatc

SEQ ID NO: 3303 - RNA, 20 nt, synthetic construct
  modified_base 1: mod_base = OTHER; note = thymine
  misc_feature 1..20: note = Antisense oligonucleotide
  modified_base 1: mod_base = OTHER; note = misc_feature - bicyclic nucleic acid scaffold modification
  modified_base 5: mod_base = OTHER; note = misc_feature - bicyclic nucleic acid scaffold modification
  modified_base 15: mod_base = OTHER; note = misc_feature - bicyclic nucleic acid scaffold modification
  modified_base 20: mod_base = OTHER; note = misc_feature - bicyclic nucleic acid scaffold modification
  source 1..20: mol_type = other RNA
tgccgctgcccaatgccatc

SEQ ID NO: 3304 - RNA, 20 nt, synthetic construct
  modified_base 1: mod_base = OTHER; note = thymine
  misc_feature 1..20: note = Antisense oligonucleotide
  modified_base 1: mod_base = OTHER; note = misc_feature - bicyclic nucleic acid scaffold modification
  modified_base 11: mod_base = OTHER; note = misc_feature - bicyclic nucleic acid scaffold modification
  modified_base 17: mod_base = OTHER; note = misc_feature - bicyclic nucleic acid scaffold modification
  modified_base 20: mod_base = OTHER; note = misc_feature - bicyclic nucleic acid scaffold modification
  source 1..20: mol_type = other RNA
tgccgctgcccaatgccatc

SEQ ID NO: 3305 - RNA, 20 nt, synthetic construct
  modified_base 1: mod_base = OTHER; note = thymine
  misc_feature 1..20: note = Antisense oligonucleotide
  modified_base 1: mod_base = OTHER; note = misc_feature - bicyclic nucleic acid scaffold modification
  modified_base 6: mod_base = OTHER; note = misc_feature - bicyclic nucleic acid scaffold modification
  modified_base 11: mod_base = OTHER; note = misc_feature - bicyclic nucleic acid scaffold modification
  modified_base 17: mod_base = OTHER; note = misc_feature - bicyclic nucleic acid scaffold modification
  modified_base 20: mod_base = OTHER; note = misc_feature - bicyclic nucleic acid scaffold modification
  source 1..20: mol_type = other RNA
tgccgctgcccaatgccatc

SEQ ID NO: 3306 - RNA, 20 nt, synthetic construct
  modified_base 1: mod_base = OTHER; note = thymine
  misc_feature 1..20: note = Antisense oligonucleotide
  modified_base 1..2: mod_base = OTHER; note = misc_feature - bicyclic nucleic acid scaffold modification
  modified_base 8: mod_base = OTHER; note = misc_feature - bicyclic nucleic acid scaffold modification
  modified_base 20: mod_base = OTHER; note = misc_feature - bicyclic nucleic acid scaffold modification
  source 1..20: mol_type = other RNA
tgccgctgcccaatgccatc

SEQ ID NO: 3307 - RNA, 20 nt, synthetic construct
  modified_base 1: mod_base = OTHER; note = thymine
  modified_base 19: mod_base = OTHER; note = thymine
  misc_feature 1..20: note = Antisense oligonucleotide
  modified_base 1..2: mod_base = OTHER; note = misc_feature - bicyclic nucleic acid scaffold modification
  modified_base 19..20: mod_base = OTHER; note = misc_feature - bicyclic nucleic acid scaffold modification
  source 1..20: mol_type = other RNA
tgccgctgcccaatgccatc

SEQ ID NO: 3308 - RNA, 20 nt, synthetic construct
  modified_base 1: mod_base = OTHER; note = thymine
  modified_base 19: mod_base = OTHER; note = thymine
  misc_feature 1..20: note = Antisense oligonucleotide
  modified_base 1..2: mod_base = OTHER; note = misc_feature - bicyclic nucleic acid scaffold modification
  modified_base 11: mod_base = OTHER; note = misc_feature - bicyclic nucleic acid scaffold modification
  modified_base 15: mod_base = OTHER; note = misc_feature - bicyclic nucleic acid scaffold modification
  modified_base 19..20: mod_base = OTHER; note = misc_feature - bicyclic nucleic acid scaffold modification
  source 1..20: mol_type = other RNA
tgccgctgcccaatgccatc

SEQ ID NO: 3309 - RNA, 20 nt, synthetic construct
  misc_feature 1..20: note = Antisense oligonucleotide
  modified_base 1: mod_base = OTHER; note = misc_feature - bicyclic nucleic acid scaffold modification
  modified_base 20: mod_base = OTHER; note = misc_feature - bicyclic nucleic acid scaffold modification
  source 1..20: mol_type = other RNA
gccgctgcccaatgccatcc

SEQ ID NO: 3310 - RNA, 20 nt, synthetic construct
  misc_feature 1..20: note = Antisense oligonucleotide
  modified_base 1: mod_base = OTHER; note = misc_feature - bicyclic nucleic acid scaffold modification
  modified_base 4: mod_base = OTHER; note = misc_feature - bicyclic nucleic acid scaffold modification
  modified_base 20: mod_base = OTHER; note = misc_feature - bicyclic nucleic acid scaffold modification
  source 1..20: mol_type = other RNA
gccgctgcccaatgccatcc

SEQ ID NO: 3311 - RNA, 20 nt, synthetic construct
  misc_feature 1..20: note = Antisense oligonucleotide
  modified_base 1: mod_base = OTHER; note = misc_feature - bicyclic nucleic acid scaffold modification
  modified_base 7: mod_base = OTHER; note = misc_feature - bicyclic nucleic acid scaffold modification
  modified_base 20: mod_base = OTHER; note = misc_feature - bicyclic nucleic acid scaffold modification
  source 1..20: mol_type = other RNA
gccgctgcccaatgccatcc

SEQ ID NO: 3312 - RNA, 20 nt, synthetic construct
  misc_feature 1..20: note = Antisense oligonucleotide
  modified_base 1: mod_base = OTHER; note = misc_feature - bicyclic nucleic acid scaffold modification
  modified_base 14: mod_base = OTHER; note = misc_feature - bicyclic nucleic acid scaffold modification
  modified_base 20: mod_base = OTHER; note = misc_feature - bicyclic nucleic acid scaffold modification
  source 1..20: mol_type = other RNA
gccgctgcccaatgccatcc

SEQ ID NO: 3313 - RNA, 20 nt, synthetic construct
  misc_feature 1..20: note = Antisense oligonucleotide
  modified_base 1: mod_base = OTHER; note = misc_feature - bicyclic nucleic acid scaffold modification
  modified_base 16: mod_base = OTHER; note = misc_feature - bicyclic nucleic acid scaffold modification
  modified_base 20: mod_base = OTHER; note = misc_feature - bicyclic nucleic acid scaffold modification
  source 1..20: mol_type = other RNA
gccgctgcccaatgccatcc

SEQ ID NO: 3314 - RNA, 20 nt, synthetic construct
  misc_feature 1..20: note = Antisense oligonucleotide
  modified_base 1: mod_base = OTHER; note = misc_feature - bicyclic nucleic acid scaffold modification
  modified_base 10: mod_base = OTHER; note = misc_feature - bicyclic nucleic acid scaffold modification
  modified_base 20: mod_base = OTHER; note = misc_feature - bicyclic nucleic acid scaffold modification
  source 1..20: mol_type = other RNA
gccgctgcccaatgccatcc

SEQ ID NO: 3315 - RNA, 20 nt, synthetic construct
  misc_feature 1..20: note = Antisense oligonucleotide
  modified_base 1: mod_base = OTHER; note = misc_feature - bicyclic nucleic acid scaffold modification
  modified_base 5: mod_base = OTHER; note = misc_feature - bicyclic nucleic acid scaffold modification
  modified_base 20: mod_base = OTHER; note = misc_feature - bicyclic nucleic acid scaffold modification
  source 1..20: mol_type = other RNA
gccgctgcccaatgccatcc

SEQ ID NO: 3316 - RNA, 20 nt, synthetic construct
  misc_feature 1..20: note = Antisense oligonucleotide
  modified_base 1: mod_base = OTHER; note = misc_feature - bicyclic nucleic acid scaffold modification
  modified_base 4: mod_base = OTHER; note = misc_feature - bicyclic nucleic acid scaffold modification
  modified_base 14: mod_base = OTHER; note = misc_feature - bicyclic nucleic acid scaffold modification
  modified_base 20: mod_base = OTHER; note = misc_feature - bicyclic nucleic acid scaffold modification
  source 1..20: mol_type = other RNA
gccgctgcccaatgccatcc

SEQ ID NO: 3317 - RNA, 20 nt, synthetic construct
  misc_feature 1..20: note = Antisense oligonucleotide
  modified_base 1: mod_base = OTHER; note = misc_feature - bicyclic nucleic acid scaffold modification
  modified_base 7: mod_base = OTHER; note = misc_feature - bicyclic nucleic acid scaffold modification
  modified_base 14: mod_base = OTHER; note = misc_feature - bicyclic nucleic acid scaffold modification
  modified_base 20: mod_base = OTHER; note = misc_feature - bicyclic nucleic acid scaffold modification
  source 1..20: mol_type = other RNA
gccgctgcccaatgccatcc

SEQ ID NO: 3318 - RNA, 20 nt, synthetic construct
  misc_feature 1..20: note = Antisense oligonucleotide
  modified_base 1: mod_base = OTHER; note = misc_feature - bicyclic nucleic acid scaffold modification
  modified_base 10: mod_base = OTHER; note = misc_feature - bicyclic nucleic acid scaffold modification
  modified_base 16: mod_base = OTHER; note = misc_feature - bicyclic nucleic acid scaffold modification
  modified_base 20: mod_base = OTHER; note = misc_feature - bicyclic nucleic acid scaffold modification
  source 1..20: mol_type = other RNA
gccgctgcccaatgccatcc

SEQ ID NO: 3319 - RNA, 20 nt, synthetic construct
  misc_feature 1..20: note = Antisense oligonucleotide
  modified_base 1: mod_base = OTHER; note = misc_feature - bicyclic nucleic acid scaffold modification
  modified_base 5: mod_base = OTHER; note = misc_feature - bicyclic nucleic acid scaffold modification
  modified_base 10: mod_base = OTHER; note = misc_feature - bicyclic nucleic acid scaffold modification
  modified_base 16: mod_base = OTHER; note = misc_feature - bicyclic nucleic acid scaffold modification
  modified_base 20: mod_base = OTHER; note = misc_feature - bicyclic nucleic acid scaffold modification
  source 1..20: mol_type = other RNA
gccgctgcccaatgccatcc

SEQ ID NO: 3320 - RNA, 20 nt, synthetic construct
  misc_feature 1..20: note = Antisense oligonucleotide
  modified_base 1..2: mod_base = OTHER; note = misc_feature - bicyclic nucleic acid scaffold modification
  modified_base 19..20: mod_base = OTHER; note = misc_feature - bicyclic nucleic acid scaffold modification
  source 1..20: mol_type = other RNA
gccgctgcccaatgccatcc

SEQ ID NO: 3321 - RNA, 20 nt, synthetic construct
  misc_feature 1..20: note = Antisense oligonucleotide
  modified_base 1..2: mod_base = OTHER; note = misc_feature - bicyclic nucleic acid scaffold modification
  modified_base 10: mod_base = OTHER; note = misc_feature - bicyclic nucleic acid scaffold modification
  modified_base 19..20: mod_base = OTHER; note = misc_feature - bicyclic nucleic acid scaffold modification
  source 1..20: mol_type = other RNA
gccgctgcccaatgccatcc

SEQ ID NO: 3322 - RNA, 20 nt, synthetic construct
  misc_feature 1..20: note = Antisense oligonucleotide
  modified_base 1: mod_base = OTHER; note = misc_feature - bicyclic nucleic acid scaffold modification
  modified_base 5: mod_base = OTHER; note = misc_feature - bicyclic nucleic acid scaffold modification
  modified_base 10: mod_base = OTHER; note = misc_feature - bicyclic nucleic acid scaffold modification
  modified_base 16: mod_base = OTHER; note = misc_feature - bicyclic nucleic acid scaffold modification
  modified_base 20: mod_base = OTHER; note = misc_feature - bicyclic nucleic acid scaffold modification
  source 1..20: mol_type = other RNA
gccgctgcccaatgccatcc

SEQ ID NO: 3323 - RNA, 20 nt, synthetic construct
  misc_feature 1..20: note = Antisense oligonucleotide
  modified_base 1: mod_base = OTHER; note = misc_feature - bicyclic nucleic acid scaffold modification
  modified_base 4: mod_base = OTHER; note = misc_feature - bicyclic nucleic acid scaffold modification
  modified_base 7: mod_base = OTHER; note = misc_feature - bicyclic nucleic acid scaffold modification
  modified_base 14: mod_base = OTHER; note = misc_feature - bicyclic nucleic acid scaffold modification
  modified_base 20: mod_base = OTHER; note = misc_feature - bicyclic nucleic acid scaffold modification
  source 1..20: mol_type = other RNA
gccgctgcccaatgccatcc

SEQ ID NO: 3324 - RNA, 20 nt, synthetic construct
  modified_base 20: mod_base = OTHER; note = thymine
  misc_feature 1..20: note = Antisense oligonucleotide
  modified_base 1: mod_base = OTHER; note = misc_feature - bicyclic nucleic acid scaffold modification
  modified_base 20: mod_base = OTHER; note = misc_feature - bicyclic nucleic acid scaffold modification
  source 1..20: mol_type = other RNA
ccgctgcccaatgccatcct

SEQ ID NO: 3325 - RNA, 20 nt, synthetic construct
  modified_base 20: mod_base = OTHER; note = thymine
  misc_feature 1..20: note = Antisense oligonucleotide
  modified_base 1: mod_base = OTHER; note = misc_feature - bicyclic nucleic acid scaffold modification
  modified_base 3: mod_base = OTHER; note = misc_feature - bicyclic nucleic acid scaffold modification
  modified_base 20: mod_base = OTHER; note = misc_feature - bicyclic nucleic acid scaffold modification
  source 1..20: mol_type = other RNA
ccgctgcccaatgccatcct

SEQ ID NO: 3326 - RNA, 20 nt, synthetic construct
  modified_base 20: mod_base = OTHER; note = thymine
  misc_feature 1..20: note = Antisense oligonucleotide
  modified_base 1: mod_base = OTHER; note = misc_feature - bicyclic nucleic acid scaffold modification
  modified_base 6: mod_base = OTHER; note = misc_feature - bicyclic nucleic acid scaffold modification
  modified_base 20: mod_base = OTHER; note = misc_feature - bicyclic nucleic acid scaffold modification
  source 1..20: mol_type = other RNA
ccgctgcccaatgccatcct

SEQ ID NO: 3327 - RNA, 20 nt, synthetic construct
  modified_base 20: mod_base = OTHER; note = thymine
  misc_feature 1..20: note = Antisense oligonucleotide
  modified_base 1: mod_base = OTHER; note = misc_feature - bicyclic nucleic acid scaffold modification
  modified_base 13: mod_base = OTHER; note = misc_feature - bicyclic nucleic acid scaffold modification
  modified_base 20: mod_base = OTHER; note = misc_feature - bicyclic nucleic acid scaffold modification
  source 1..20: mol_type = other RNA
ccgctgcccaatgccatcct

SEQ ID NO: 3328 - RNA, 20 nt, synthetic construct
  modified_base 20: mod_base = OTHER; note = thymine
  misc_feature 1..20: note = Antisense oligonucleotide
  modified_base 1: mod_base = OTHER; note = misc_feature - bicyclic nucleic acid scaffold modification
  modified_base 18: mod_base = OTHER; note = misc_feature - bicyclic nucleic acid scaffold modification
  modified_base 20: mod_base = OTHER; note = misc_feature - bicyclic nucleic acid scaffold modification
  source 1..20: mol_type = other RNA
ccgctgcccaatgccatcct

SEQ ID NO: 3329 - RNA, 20 nt, synthetic construct
  modified_base 20: mod_base = OTHER; note = thymine
  misc_feature 1..20: note = Antisense oligonucleotide
  modified_base 1: mod_base = OTHER; note = misc_feature - bicyclic nucleic acid scaffold modification
  modified_base 15: mod_base = OTHER; note = misc_feature - bicyclic nucleic acid scaffold modification
  modified_base 20: mod_base = OTHER; note = misc_feature - bicyclic nucleic acid scaffold modification
  source 1..20: mol_type = other RNA
ccgctgcccaatgccatcct

SEQ ID NO: 3330 - RNA, 20 nt, synthetic construct
  modified_base 20: mod_base = OTHER; note = thymine
  misc_feature 1..20: note = Antisense oligonucleotide
  modified_base 1: mod_base = OTHER; note = misc_feature - bicyclic nucleic acid scaffold modification
  modified_base 4: mod_base = OTHER; note = misc_feature - bicyclic nucleic acid scaffold modification
  modified_base 9: mod_base = OTHER; note = misc_feature - bicyclic nucleic acid scaffold modification
  modified_base 20: mod_base = OTHER; note = misc_feature - bicyclic nucleic acid scaffold modification
  source 1..20: mol_type = other RNA
ccgctgcccaatgccatcct

SEQ ID NO: 3331 - RNA, 20 nt, synthetic construct
  modified_base 20: mod_base = OTHER; note = thymine
  misc_feature 1..20: note = Antisense oligonucleotide
  modified_base 1: mod_base = OTHER; note = misc_feature - bicyclic nucleic acid scaffold modification
  modified_base 6: mod_base = OTHER; note = misc_feature - bicyclic nucleic acid scaffold modification
  modified_base 13: mod_base = OTHER; note = misc_feature - bicyclic nucleic acid scaffold modification
  modified_base 20: mod_base = OTHER; note = misc_feature - bicyclic nucleic acid scaffold modification
  source 1..20: mol_type = other RNA
ccgctgcccaatgccatcct

SEQ ID NO: 3332 - RNA, 20 nt, synthetic construct
  modified_base 20: mod_base = OTHER; note = thymine
  misc_feature 1..20: note = Antisense oligonucleotide
  modified_base 1: mod_base = OTHER; note = misc_feature - bicyclic nucleic acid scaffold modification
  modified_base 9: mod_base = OTHER; note = misc_feature - bicyclic nucleic acid scaffold modification
  modified_base 15: mod_base = OTHER; note = misc_feature - bicyclic nucleic acid scaffold modification
  modified_base 20: mod_base = OTHER; note = misc_feature - bicyclic nucleic acid scaffold modification
  source 1..20: mol_type = other RNA
ccgctgcccaatgccatcct

SEQ ID NO: 3333 - RNA, 20 nt, synthetic construct
  modified_base 20: mod_base = OTHER; note = thymine
  misc_feature 1..20: note = Antisense oligonucleotide
  modified_base 1: mod_base = OTHER; note = misc_feature - bicyclic nucleic acid scaffold modification
  modified_base 4: mod_base = OTHER; note = misc_feature - bicyclic nucleic acid scaffold modification
  modified_base 9: mod_base = OTHER; note = misc_feature - bicyclic nucleic acid scaffold modification
  modified_base 20: mod_base = OTHER; note = misc_feature - bicyclic nucleic acid scaffold modification
  source 1..20: mol_type = other RNA
ccgctgcccaatgccatcct

SEQ ID NO: 3334 - RNA, 20 nt, synthetic construct
  modified_base 20: mod_base = OTHER; note = thymine
  misc_feature 1..20: note = Antisense oligonucleotide
  modified_base 1: mod_base = OTHER; note = misc_feature - bicyclic nucleic acid scaffold modification
  modified_base 4: mod_base = OTHER; note = misc_feature - bicyclic nucleic acid scaffold modification
  modified_base 9: mod_base = OTHER; note = misc_feature - bicyclic nucleic acid scaffold modification
  modified_base 15: mod_base = OTHER; note = misc_feature - bicyclic nucleic acid scaffold modification
  modified_base 20: mod_base = OTHER; note = misc_feature - bicyclic nucleic acid scaffold modification
  source 1..20: mol_type = other RNA
ccgctgcccaatgccatcct

SEQ ID NO: 3335 - RNA, 20 nt, synthetic construct
  modified_base 20: mod_base = OTHER; note = thymine
  misc_feature 1..20: note = Antisense oligonucleotide
  modified_base 1..2: mod_base = OTHER; note = misc_feature - bicyclic nucleic acid scaffold modification
  modified_base 19..20: mod_base = OTHER; note = misc_feature - bicyclic nucleic acid scaffold modification
  source 1..20: mol_type = other RNA
ccgctgcccaatgccatcct

SEQ ID NO: 3336 - RNA, 20 nt, synthetic construct
  modified_base 20: mod_base = OTHER; note = thymine
  misc_feature 1..20: note = Antisense oligonucleotide
  modified_base 1..2: mod_base = OTHER; note = misc_feature - bicyclic nucleic acid scaffold modification
  modified_base 9: mod_base = OTHER; note = misc_feature - bicyclic nucleic acid scaffold modification
  modified_base 19..20: mod_base = OTHER; note = misc_feature - bicyclic nucleic acid scaffold modification
  source 1..20: mol_type = other RNA
ccgctgcccaatgccatcct

SEQ ID NO: 3337 - RNA, 20 nt, synthetic construct
  modified_base 20: mod_base = OTHER; note = thymine
  misc_feature 1..20: note = Antisense oligonucleotide
  modified_base 1..2: mod_base = OTHER; note = misc_feature - bicyclic nucleic acid scaffold modification
  modified_base 9: mod_base = OTHER; note = misc_feature - bicyclic nucleic acid scaffold modification
  modified_base 15: mod_base = OTHER; note = misc_feature - bicyclic nucleic acid scaffold modification
  modified_base 19..20: mod_base = OTHER; note = misc_feature - bicyclic nucleic acid scaffold modification
  source 1..20: mol_type = other RNA
ccgctgcccaatgccatcct

SEQ ID NO: 3338 - RNA, 20 nt, synthetic construct
  misc_feature 1..20: note = Antisense oligonucleotide
  modified_base 1: mod_base = OTHER; note = misc_feature - bicyclic nucleic acid scaffold modification
  modified_base 20: mod_base = OTHER; note = misc_feature - bicyclic nucleic acid scaffold modification
  source 1..20: mol_type = other RNA
cgctgcccaatgccatcctg

SEQ ID NO: 3339 - RNA, 20 nt, synthetic construct
  misc_feature 1..20: note = Antisense oligonucleotide
  modified_base 1..2: mod_base = OTHER; note = misc_feature - bicyclic nucleic acid scaffold modification
  modified_base 20: mod_base = OTHER; note = misc_feature - bicyclic nucleic acid scaffold modification
  source 1..20: mol_type = other RNA
cgctgcccaatgccatcctg

SEQ ID NO: 3340 - RNA, 20 nt, synthetic construct
  misc_feature 1..20: note = Antisense oligonucleotide
  modified_base 1: mod_base = OTHER; note = misc_feature - bicyclic nucleic acid scaffold modification
  modified_base 5: mod_base = OTHER; note = misc_feature - bicyclic nucleic acid scaffold modification
  modified_base 20: mod_base = OTHER; note = misc_feature - bicyclic nucleic acid scaffold modification
  source 1..20: mol_type = other RNA
cgctgcccaatgccatcctg

SEQ ID NO: 3341 - RNA, 20 nt, synthetic construct
  misc_feature 1..20: note = Antisense oligonucleotide
  modified_base 1: mod_base = OTHER; note = misc_feature - bicyclic nucleic acid scaffold modification
  modified_base 12: mod_base = OTHER; note = misc_feature - bicyclic nucleic acid scaffold modification
  modified_base 20: mod_base = OTHER; note = misc_feature - bicyclic nucleic acid scaffold modification
  source 1..20: mol_type = other RNA
cgctgcccaatgccatcctg

SEQ ID NO: 3342 - RNA, 20 nt, synthetic construct
  misc_feature 1..20: note = Antisense oligonucleotide
  modified_base 1: mod_base = OTHER; note = misc_feature - bicyclic nucleic acid scaffold modification
  modified_base 18: mod_base = OTHER; note = misc_feature - bicyclic nucleic acid scaffold modification
  modified_base 20: mod_base = OTHER; note = misc_feature - bicyclic nucleic acid scaffold modification
  source 1..20: mol_type = other RNA
cgctgcccaatgccatcctg

SEQ ID NO: 3343 - RNA, 20 nt, synthetic construct
  misc_feature 1..20: note = Antisense oligonucleotide
  modified_base 1: mod_base = OTHER; note = misc_feature - bicyclic nucleic acid scaffold modification
  modified_base 14: mod_base = OTHER; note = misc_feature - bicyclic nucleic acid scaffold modification
  modified_base 20: mod_base = OTHER; note = misc_feature - bicyclic nucleic acid scaffold modification
  source 1..20: mol_type = other RNA
cgctgcccaatgccatcctg

SEQ ID NO: 3344 - RNA, 20 nt, synthetic construct
  misc_feature 1..20: note = Antisense oligonucleotide
  modified_base 1: mod_base = OTHER; note = misc_feature - bicyclic nucleic acid scaffold modification
  modified_base 8: mod_base = OTHER; note = misc_feature - bicyclic nucleic acid scaffold modification
  modified_base 20: mod_base = OTHER; note = misc_feature - bicyclic nucleic acid scaffold modification
  source 1..20: mol_type = other RNA
cgctgcccaatgccatcctg

SEQ ID NO: 3345 - RNA, 20 nt, synthetic construct
  misc_feature 1..20: note = Antisense oligonucleotide
  modified_base 1: mod_base = OTHER; note = misc_feature - bicyclic nucleic acid scaffold modification
  modified_base 3: mod_base = OTHER; note = misc_feature - bicyclic nucleic acid scaffold modification
  modified_base 20: mod_base = OTHER; note = misc_feature - bicyclic nucleic acid scaffold modification
  source 1..20: mol_type = other RNA
cgctgcccaatgccatcctg

SEQ ID NO: 3346 - RNA, 20 nt, synthetic construct
  misc_feature 1..20: note = Antisense oligonucleotide
  modified_base 1: mod_base = OTHER; note = misc_feature - bicyclic nucleic acid scaffold modification
  modified_base 5: mod_base = OTHER; note = misc_feature - bicyclic nucleic acid scaffold modification
  modified_base 12: mod_base = OTHER; note = misc_feature - bicyclic nucleic acid scaffold modification
  modified_base 20: mod_base = OTHER; note = misc_feature - bicyclic nucleic acid scaffold modification
  source 1..20: mol_type = other RNA
cgctgcccaatgccatcctg

SEQ ID NO: 3347 - RNA, 20 nt, synthetic construct
  misc_feature 1..20: note = Antisense oligonucleotide
  modified_base 1: mod_base = OTHER; note = misc_feature - bicyclic nucleic acid scaffold modification
  modified_base 8: mod_base = OTHER; note = misc_feature - bicyclic nucleic acid scaffold modification
  modified_base 14: mod_base = OTHER; note = misc_feature - bicyclic nucleic acid scaffold modification
  modified_base 20: mod_base = OTHER; note = misc_feature - bicyclic nucleic acid scaffold modification
  source 1..20: mol_type = other RNA
cgctgcccaatgccatcctg

SEQ ID NO: 3348 - RNA, 20 nt, synthetic construct
  misc_feature 1..20: note = Antisense oligonucleotide
  modified_base 1: mod_base = OTHER; note = misc_feature - bicyclic nucleic acid scaffold modification
  modified_base 3: mod_base = OTHER; note = misc_feature - bicyclic nucleic acid scaffold modification
  modified_base 18: mod_base = OTHER; note = misc_feature - bicyclic nucleic acid scaffold modification
  modified_base 20: mod_base = OTHER; note = misc_feature - bicyclic nucleic acid scaffold modification
  source 1..20: mol_type = other RNA
cgctgcccaatgccatcctg

SEQ ID NO: 3349 - RNA, 20 nt, synthetic construct
  modified_base 19: mod_base = OTHER; note = thymine
  misc_feature 1..20: note = Antisense oligonucleotide
  modified_base 1..2: mod_base = OTHER; note = misc_feature - bicyclic nucleic acid scaffold modification
  modified_base 19..20: mod_base = OTHER; note = misc_feature - bicyclic nucleic acid scaffold modification
  source 1..20: mol_type = other RNA
cgctgcccaatgccatcctg

SEQ ID NO: 3350 - RNA, 20 nt, synthetic construct
  modified_base 19: mod_base = OTHER; note = thymine
  misc_feature 1..20: note = Antisense oligonucleotide
  modified_base 1..2: mod_base = OTHER; note = misc_feature - bicyclic nucleic acid scaffold modification
  modified_base 12: mod_base = OTHER; note = misc_feature - bicyclic nucleic acid scaffold modification
  modified_base 19..20: mod_base = OTHER; note = misc_feature - bicyclic nucleic acid scaffold modification
  source 1..20: mol_type = other RNA
cgctgcccaatgccatcctg

SEQ ID NO: 3351 - RNA, 20 nt, synthetic construct
  modified_base 19: mod_base = OTHER; note = thymine
  misc_feature 1..20: note = Antisense oligonucleotide
  modified_base 1..2: mod_base = OTHER; note = misc_feature - bicyclic nucleic acid scaffold modification
  modified_base 5: mod_base = OTHER; note = misc_feature - bicyclic nucleic acid scaffold modification
  modified_base 12: mod_base = OTHER; note = misc_feature - bicyclic nucleic acid scaffold modification
  modified_base 19..20: mod_base = OTHER; note = misc_feature - bicyclic nucleic acid scaffold modification
  source 1..20: mol_type = other RNA
cgctgcccaatgccatcctg

SEQ ID NO: 3352 - RNA, 18 nt, synthetic construct
  modified_base 1: mod_base = OTHER; note = thymine
  misc_feature 1..18: note = Antisense oligonucleotide
  modified_base 1: mod_base = OTHER; note = misc_feature - bicyclic nucleic acid scaffold modification
  modified_base 18: mod_base = OTHER; note = misc_feature - bicyclic nucleic acid scaffold modification
  source 1..18: mol_type = other RNA
tttgccgctgcccaatgc

SEQ ID NO: 3353 - RNA, 18 nt, synthetic construct
  modified_base 1: mod_base = OTHER; note = thymine
  misc_feature 1..18: note = Antisense oligonucleotide
  modified_base 1: mod_base = OTHER; note = misc_feature - bicyclic nucleic acid scaffold modification
  modified_base 4: mod_base = OTHER; note = misc_feature - bicyclic nucleic acid scaffold modification
  modified_base 18: mod_base = OTHER; note = misc_feature - bicyclic nucleic acid scaffold modification
  source 1..18: mol_type = other RNA
tttgccgctgcccaatgc

SEQ ID NO: 3354 - RNA, 18 nt, synthetic construct
  modified_base 1: mod_base = OTHER; note = thymine
  misc_feature 1..18: note = Antisense oligonucleotide
  modified_base 1: mod_base = OTHER; note = misc_feature - bicyclic nucleic acid scaffold modification
  modified_base 7: mod_base = OTHER; note = misc_feature - bicyclic nucleic acid scaffold modification
  modified_base 18: mod_base = OTHER; note = misc_feature - bicyclic nucleic acid scaffold modification
  source 1..18: mol_type = other RNA
tttgccgctgcccaatgc

SEQ ID NO: 3355 - RNA, 18 nt, synthetic construct
  modified_base 1: mod_base = OTHER; note = thymine
  misc_feature 1..18: note = Antisense oligonucleotide
  modified_base 1: mod_base = OTHER; note = misc_feature - bicyclic nucleic acid scaffold modification
  modified_base 10: mod_base = OTHER; note = misc_feature - bicyclic nucleic acid scaffold modification
  modified_base 18: mod_base = OTHER; note = misc_feature - bicyclic nucleic acid scaffold modification
  source 1..18: mol_type = other RNA
tttgccgctgcccaatgc

SEQ ID NO: 3356 - RNA, 18 nt, synthetic construct
  modified_base 1: mod_base = OTHER; note = thymine
  misc_feature 1..18: note = Antisense oligonucleotide
  modified_base 1: mod_base = OTHER; note = misc_feature - bicyclic nucleic acid scaffold modification
  modified_base 17..18: mod_base = OTHER; note = misc_feature - bicyclic nucleic acid scaffold modification
  source 1..18: mol_type = other RNA
tttgccgctgcccaatgc

SEQ ID NO: 3357 - RNA, 18 nt, synthetic construct
  modified_base 1: mod_base = OTHER; note = thymine
  misc_feature 1..18: note = Antisense oligonucleotide
  modified_base 1: mod_base = OTHER; note = misc_feature - bicyclic nucleic acid scaffold modification
  modified_base 13: mod_base = OTHER; note = misc_feature - bicyclic nucleic acid scaffold modification
  modified_base 18: mod_base = OTHER; note = misc_feature - bicyclic nucleic acid scaffold modification
  source 1..18: mol_type = other RNA
tttgccgctgcccaatgc

SEQ ID NO: 3358 - RNA, 18 nt, synthetic construct
  modified_base 1: mod_base = OTHER; note = thymine
  misc_feature 1..18: note = Antisense oligonucleotide
  modified_base 1: mod_base = OTHER; note = misc_feature - bicyclic nucleic acid scaffold modification
  modified_base 8: mod_base = OTHER; note = misc_feature - bicyclic nucleic acid scaffold modification
  modified_base 18: mod_base = OTHER; note = misc_feature - bicyclic nucleic acid scaffold modification
  source 1..18: mol_type = other RNA
tttgccgctgcccaatgc

SEQ ID NO: 3359 - RNA, 18 nt, synthetic construct
  modified_base 1: mod_base = OTHER; note = thymine
  misc_feature 1..18: note = Antisense oligonucleotide
  modified_base 1: mod_base = OTHER; note = misc_feature - bicyclic nucleic acid scaffold modification
  modified_base 11: mod_base = OTHER; note = misc_feature - bicyclic nucleic acid scaffold modification
  modified_base 18: mod_base = OTHER; note = misc_feature - bicyclic nucleic acid scaffold modification
  source 1..18: mol_type = other RNA
tttgccgctgcccaatgc

SEQ ID NO: 3360 - RNA, 18 nt, synthetic construct
  modified_base 1: mod_base = OTHER; note = thymine
  misc_feature 1..18: note = Antisense oligonucleotide
  modified_base 1: mod_base = OTHER; note = misc_feature - bicyclic nucleic acid scaffold modification
  modified_base 6: mod_base = OTHER; note = misc_feature - bicyclic nucleic acid scaffold modification
  modified_base 18: mod_base = OTHER; note = misc_feature - bicyclic nucleic acid scaffold modification
  source 1..18: mol_type = other RNA
tttgccgctgcccaatgc

SEQ ID NO: 3361 - RNA, 18 nt, synthetic construct
  modified_base 1: mod_base = OTHER; note = thymine
  misc_feature 1..18: note = Antisense oligonucleotide
  modified_base 1: mod_base = OTHER; note = misc_feature - bicyclic nucleic acid scaffold modification
  modified_base 4: mod_base = OTHER; note = misc_feature - bicyclic nucleic acid scaffold modification
  modified_base 10: mod_base = OTHER; note = misc_feature - bicyclic nucleic acid scaffold modification
  modified_base 18: mod_base = OTHER; note = misc_feature - bicyclic nucleic acid scaffold modification
  source 1..18: mol_type = other RNA
tttgccgctgcccaatgc

SEQ ID NO: 3362 - RNA, 18 nt, synthetic construct
  modified_base 1: mod_base = OTHER; note = thymine
  misc_feature 1..18: note = Antisense oligonucleotide
  modified_base 1: mod_base = OTHER; note = misc_feature - bicyclic nucleic acid scaffold modification
  modified_base 7: mod_base = OTHER; note = misc_feature - bicyclic nucleic acid scaffold modification
  modified_base 17..18: mod_base = OTHER; note = misc_feature - bicyclic nucleic acid scaffold modification
  source 1..18: mol_type = other RNA
tttgccgctgcccaatgc

SEQ ID NO: 3363 - RNA, 18 nt, synthetic construct
  modified_base 1: mod_base = OTHER; note = thymine
  misc_feature 1..18: note = Antisense oligonucleotide
  modified_base 1: mod_base = OTHER; note = misc_feature - bicyclic nucleic acid scaffold modification
  modified_base 8: mod_base = OTHER; note = misc_feature - bicyclic nucleic acid scaffold modification
  modified_base 13: mod_base = OTHER; note = misc_feature - bicyclic nucleic acid scaffold modification
  modified_base 18: mod_base = OTHER; note = misc_feature - bicyclic nucleic acid scaffold modification
  source 1..18: mol_type = other RNA
tttgccgctgcccaatgc

SEQ ID NO: 3364 - RNA, 18 nt, synthetic construct
  modified_base 1: mod_base = OTHER; note = thymine
  misc_feature 1..18: note = Antisense oligonucleotide
  modified_base 1: mod_base = OTHER; note = misc_feature - bicyclic nucleic acid scaffold modification
  modified_base 5: mod_base = OTHER; note = misc_feature - bicyclic nucleic acid scaffold modification
  modified_base 11: mod_base = OTHER; note = misc_feature - bicyclic nucleic acid scaffold modification
  modified_base 18: mod_base = OTHER; note = misc_feature - bicyclic nucleic acid scaffold modification
  source 1..18: mol_type = other RNA
tttgccgctgcccaatgc

SEQ ID NO: 3365 - RNA, 18 nt, synthetic construct
  modified_base 1..2: mod_base = OTHER; note = thymine
  misc_feature 1..18: note = Antisense oligonucleotide
  modified_base 1..2: mod_base = OTHER; note = misc_feature - bicyclic nucleic acid scaffold modification
  modified_base 17..18: mod_base = OTHER; note = misc_feature - bicyclic nucleic acid scaffold modification
  source 1..18: mol_type = other RNA
tttgccgctgcccaatgc

SEQ ID NO: 3366 - RNA, 18 nt, synthetic construct
  modified_base 1..2: mod_base = OTHER; note = thymine
  misc_feature 1..18: note = Antisense oligonucleotide
  modified_base 1..2: mod_base = OTHER; note = misc_feature - bicyclic nucleic acid scaffold modification
  modified_base 10: mod_base = OTHER; note = misc_feature - bicyclic nucleic acid scaffold modification
  modified_base 17..18: mod_base = OTHER; note = misc_feature - bicyclic nucleic acid scaffold modification
  source 1..18: mol_type = other RNA
tttgccgctgcccaatgc

SEQ ID NO: 3367 - RNA, 18 nt, synthetic construct
  modified_base 1: mod_base = OTHER; note = thymine
  misc_feature 1..18: note = Antisense oligonucleotide
  modified_base 1: mod_base = OTHER; note = misc_feature - bicyclic nucleic acid scaffold modification
  modified_base 18: mod_base = OTHER; note = misc_feature - bicyclic nucleic acid scaffold modification
  source 1..18: mol_type = other RNA
ttgccgctgcccaatgcc

SEQ ID NO: 3368 - RNA, 18 nt, synthetic construct
  modified_base 1: mod_base = OTHER; note = thymine
  misc_feature 1..18: note = Antisense oligonucleotide
  modified_base 1: mod_base = OTHER; note = misc_feature - bicyclic nucleic acid scaffold modification
  modified_base 16: mod_base = OTHER; note = misc_feature - bicyclic nucleic acid scaffold modification
  modified_base 18: mod_base = OTHER; note = misc_feature - bicyclic nucleic acid scaffold modification
  source 1..18: mol_type = other RNA
ttgccgctgcccaatgcc

SEQ ID NO: 3369 - RNA, 18 nt, synthetic construct
  modified_base 1: mod_base = OTHER; note = thymine
  misc_feature 1..18: note = Antisense oligonucleotide
  modified_base 1: mod_base = OTHER; note = misc_feature - bicyclic nucleic acid scaffold modification
  modified_base 9: mod_base = OTHER; note = misc_feature - bicyclic nucleic acid scaffold modification
  modified_base 18: mod_base = OTHER; note = misc_feature - bicyclic nucleic acid scaffold modification
  source 1..18: mol_type = other RNA
ttgccgctgcccaatgcc

SEQ ID NO: 3370 - RNA, 18 nt, synthetic construct
  modified_base 1: mod_base = OTHER; note = thymine
  misc_feature 1..18: note = Antisense oligonucleotide
  modified_base 1: mod_base = OTHER; note = misc_feature - bicyclic nucleic acid scaffold modification
  modified_base 6: mod_base = OTHER; note = misc_feature - bicyclic nucleic acid scaffold modification
  modified_base 18: mod_base = OTHER; note = misc_feature - bicyclic nucleic acid scaffold modification
  source 1..18: mol_type = other RNA
ttgccgctgcccaatgcc

SEQ ID NO: 3371 - RNA, 18 nt, synthetic construct
  modified_base 1: mod_base = OTHER; note = thymine
  misc_feature 1..18: note = Antisense oligonucleotide
  modified_base 1: mod_base = OTHER; note = misc_feature - bicyclic nucleic acid scaffold modification
  modified_base 3: mod_base = OTHER; note = misc_feature - bicyclic nucleic acid scaffold modification
  modified_base 18: mod_base = OTHER; note = misc_feature - bicyclic nucleic acid scaffold modification
  source 1..18: mol_type = other RNA
ttgccgctgcccaatgcc

SEQ ID NO: 3372 - RNA, 18 nt, synthetic construct
  modified_base 1: mod_base = OTHER; note = thymine
  misc_feature 1..18: note = Antisense oligonucleotide
  modified_base 1: mod_base = OTHER; note = misc_feature - bicyclic nucleic acid scaffold modification
  modified_base 12: mod_base = OTHER; note = misc_feature - bicyclic nucleic acid scaffold modification
  modified_base 18: mod_base = OTHER; note = misc_feature - bicyclic nucleic acid scaffold modification
  source 1..18: mol_type = other RNA
ttgccgctgcccaatgcc

SEQ ID NO: 3373 - RNA, 18 nt, synthetic construct
  modified_base 1: mod_base = OTHER; note = thymine
  misc_feature 1..18: note = Antisense oligonucleotide
  modified_base 1: mod_base = OTHER; note = misc_feature - bicyclic nucleic acid scaffold modification
  modified_base 7: mod_base = OTHER; note = misc_feature - bicyclic nucleic acid scaffold modification
  modified_base 18: mod_base = OTHER; note = misc_feature - bicyclic nucleic acid scaffold modification
  source 1..18: mol_type = other RNA
ttgccgctgcccaatgcc

SEQ ID NO: 3374 - RNA, 18 nt, synthetic construct
  modified_base 1: mod_base = OTHER; note = thymine
  misc_feature 1..18: note = Antisense oligonucleotide
  modified_base 1: mod_base = OTHER; note = misc_feature - bicyclic nucleic acid scaffold modification
  modified_base 5: mod_base = OTHER; note = misc_feature - bicyclic nucleic acid scaffold modification
  modified_base 18: mod_base = OTHER; note = misc_feature - bicyclic nucleic acid scaffold modification
  source 1..18: mol_type = other RNA
ttgccgctgcccaatgcc

SEQ ID NO: 3375 - RNA, 18 nt, synthetic construct
  modified_base 1: mod_base = OTHER; note = thymine
  misc_feature 1..18: note = Antisense oligonucleotide
  modified_base 1: mod_base = OTHER; note = misc_feature - bicyclic nucleic acid scaffold modification
  modified_base 9: mod_base = OTHER; note = misc_feature - bicyclic nucleic acid scaffold modification
  modified_base 16: mod_base = OTHER; note = misc_feature - bicyclic nucleic acid scaffold modification
  modified_base 18: mod_base = OTHER; note = misc_feature - bicyclic nucleic acid scaffold modification
  source 1..18: mol_type = other RNA
ttgccgctgcccaatgcc

SEQ ID NO: 3376 - RNA, 18 nt, synthetic construct
  modified_base 1: mod_base = OTHER; note = thymine
  misc_feature 1..18: note = Antisense oligonucleotide
  modified_base 1: mod_base = OTHER; note = misc_feature - bicyclic nucleic acid scaffold modification
  modified_base 3: mod_base = OTHER; note = misc_feature - bicyclic nucleic acid scaffold modification
  modified_base 9: mod_base = OTHER; note = misc_feature - bicyclic nucleic acid scaffold modification
  modified_base 18: mod_base = OTHER; note = misc_feature - bicyclic nucleic acid scaffold modification
  source 1..18: mol_type = other RNA
ttgccgctgcccaatgcc

SEQ ID NO: 3377 - RNA, 18 nt, synthetic construct
  modified_base 1: mod_base = OTHER; note = thymine
  misc_feature 1..18: note = Antisense oligonucleotide
  modified_base 1: mod_base = OTHER; note = misc_feature - bicyclic nucleic acid scaffold modification
  modified_base 6: mod_base = OTHER; note = misc_feature - bicyclic nucleic acid scaffold modification
  modified_base 16: mod_base = OTHER; note = misc_feature - bicyclic nucleic acid scaffold modification
  modified_base 18: mod_base = OTHER; note = misc_feature - bicyclic nucleic acid scaffold modification
  source 1..18: mol_type = other RNA
ttgccgctgcccaatgcc

SEQ ID NO: 3378 - RNA, 18 nt, synthetic construct
  modified_base 1: mod_base = OTHER; note = thymine
  misc_feature 1..18: note = Antisense oligonucleotide
  modified_base 1: mod_base = OTHER; note = misc_feature - bicyclic nucleic acid scaffold modification
  modified_base 7: mod_base = OTHER; note = misc_feature - bicyclic nucleic acid scaffold modification
  modified_base 12: mod_base = OTHER; note = misc_feature - bicyclic nucleic acid scaffold modification
  modified_base 18: mod_base = OTHER; note = misc_feature - bicyclic nucleic acid scaffold modification
  source 1..18: mol_type = other RNA
ttgccgctgcccaatgcc

SEQ ID NO: 3379 - RNA, 18 nt, synthetic construct
  modified_base 1: mod_base = OTHER; note = thymine
  misc_feature 1..18: note = Antisense oligonucleotide
  modified_base 1: mod_base = OTHER; note = misc_feature - bicyclic nucleic acid scaffold modification
  modified_base 4: mod_base = OTHER; note = misc_feature - bicyclic nucleic acid scaffold modification
  modified_base 10: mod_base = OTHER; note = misc_feature - bicyclic nucleic acid scaffold modification
  modified_base 17..18: mod_base = OTHER; note = misc_feature - bicyclic nucleic acid scaffold modification
  source 1..18: mol_type = other RNA
ttgccgctgcccaatgcc

SEQ ID NO: 3380 - RNA, 18 nt, synthetic construct
  modified_base 1..2: mod_base = OTHER; note = thymine
  misc_feature 1..18: note = Antisense oligonucleotide
  modified_base 1..2: mod_base = OTHER; note = misc_feature - bicyclic nucleic acid scaffold modification
  modified_base 17..18: mod_base = OTHER; note = misc_feature - bicyclic nucleic acid scaffold modification
  source 1..18: mol_type = other RNA
ttgccgctgcccaatgcc

SEQ ID NO: 3381 - RNA, 18 nt, synthetic construct
  modified_base 1..2: mod_base = OTHER; note = thymine
  misc_feature 1..18: note = Antisense oligonucleotide
  modified_base 1..2: mod_base = OTHER; note = misc_feature - bicyclic nucleic acid scaffold modification
  modified_base 9: mod_base = OTHER; note = misc_feature - bicyclic nucleic acid scaffold modification
  modified_base 17..18: mod_base = OTHER; note = misc_feature - bicyclic nucleic acid scaffold modification
  source 1..18: mol_type = other RNA
ttgccgctgcccaatgcc

SEQ ID NO: 3382 - RNA, 18 nt, synthetic construct
  modified_base 1: mod_base = OTHER; note = thymine
  misc_feature 1..18: note = Antisense oligonucleotide
  modified_base 1: mod_base = OTHER; note = misc_feature - bicyclic nucleic acid scaffold modification
  modified_base 18: mod_base = OTHER; note = misc_feature - bicyclic nucleic acid scaffold modification
  source 1..18: mol_type = other RNA
tgccgctgcccaatgcca

SEQ ID NO: 3383 - RNA, 18 nt, synthetic construct
  modified_base 1: mod_base = OTHER; note = thymine
  misc_feature 1..18: note = Antisense oligonucleotide
  modified_base 1..2: mod_base = OTHER; note = misc_feature - bicyclic nucleic acid scaffold modification
  modified_base 18: mod_base = OTHER; note = misc_feature - bicyclic nucleic acid scaffold modification
  source 1..18: mol_type = other RNA
tgccgctgcccaatgcca

SEQ ID NO: 3384 - RNA, 18 nt, synthetic construct
  modified_base 1: mod_base = OTHER; note = thymine
  misc_feature 1..18: note = Antisense oligonucleotide
  modified_base 1: mod_base = OTHER; note = misc_feature - bicyclic nucleic acid scaffold modification
  modified_base 5: mod_base = OTHER; note = misc_feature - bicyclic nucleic acid scaffold modification
  modified_base 18: mod_base = OTHER; note = misc_feature - bicyclic nucleic acid scaffold modification
  source 1..18: mol_type = other RNA
tgccgctgcccaatgcca

SEQ ID NO: 3385 - RNA, 18 nt, synthetic construct
  modified_base 1: mod_base = OTHER; note = thymine
  misc_feature 1..18: note = Antisense oligonucleotide
  modified_base 1: mod_base = OTHER; note = misc_feature - bicyclic nucleic acid scaffold modification
  modified_base 8: mod_base = OTHER; note = misc_feature - bicyclic nucleic acid scaffold modification
  modified_base 18: mod_base = OTHER; note = misc_feature - bicyclic nucleic acid scaffold modification
  source 1..18: mol_type = other RNA
tgccgctgcccaatgcca

SEQ ID NO: 3386 - RNA, 18 nt, synthetic construct
  modified_base 1: mod_base = OTHER; note = thymine
  misc_feature 1..18: note = Antisense oligonucleotide
  modified_base 1: mod_base = OTHER; note = misc_feature - bicyclic nucleic acid scaffold modification
  modified_base 15: mod_base = OTHER; note = misc_feature - bicyclic nucleic acid scaffold modification
  modified_base 18: mod_base = OTHER; note = misc_feature - bicyclic nucleic acid scaffold modification
  source 1..18: mol_type = other RNA
tgccgctgcccaatgcca

SEQ ID NO: 3387 - RNA, 18 nt, synthetic construct
  modified_base 1: mod_base = OTHER; note = thymine
  misc_feature 1..18: note = Antisense oligonucleotide
  modified_base 1: mod_base = OTHER; note = misc_feature - bicyclic nucleic acid scaffold modification
  modified_base 8: mod_base = OTHER; note = misc_feature - bicyclic nucleic acid scaffold modification
  modified_base 15: mod_base = OTHER; note = misc_feature - bicyclic nucleic acid scaffold modification
  modified_base 18: mod_base = OTHER; note = misc_feature - bicyclic nucleic acid scaffold modification
  source 1..18: mol_type = other RNA
tgccgctgcccaatgcca

SEQ ID NO: 3388 - RNA, 18 nt, synthetic construct
  modified_base 1: mod_base = OTHER; note = thymine
  misc_feature 1..18: note = Antisense oligonucleotide
  modified_base 1: mod_base = OTHER; note = misc_feature - bicyclic nucleic acid scaffold modification
  modified_base 5: mod_base = OTHER; note = misc_feature - bicyclic nucleic acid scaffold modification
  modified_base 15: mod_base = OTHER; note = misc_feature - bicyclic nucleic acid scaffold modification
  modified_base 18: mod_base = OTHER; note = misc_feature - bicyclic nucleic acid scaffold modification
  source 1..18: mol_type = other RNA
tgccgctgcccaatgcca

SEQ ID NO: 3389 - RNA, 18 nt, synthetic construct
  modified_base 1: mod_base = OTHER; note = thymine
  misc_feature 1..18: note = Antisense oligonucleotide
  modified_base 1..2: mod_base = OTHER; note = misc_feature - bicyclic nucleic acid scaffold modification
  modified_base 15: mod_base = OTHER; note = misc_feature - bicyclic nucleic acid scaffold modification
  modified_base 18: mod_base = OTHER; note = misc_feature - bicyclic nucleic acid scaffold modification
  source 1..18: mol_type = other RNA
tgccgctgcccaatgcca

SEQ ID NO: 3390 - RNA, 18 nt, synthetic construct
  modified_base 1: mod_base = OTHER; note = thymine
  misc_feature 1..18: note = Antisense oligonucleotide
  modified_base 1: mod_base = OTHER; note = misc_feature - bicyclic nucleic acid scaffold modification
  modified_base 11: mod_base = OTHER; note = misc_feature - bicyclic nucleic acid scaffold modification
  modified_base 18: mod_base = OTHER; note = misc_feature - bicyclic nucleic acid scaffold modification
  source 1..18: mol_type = other RNA
tgccgctgcccaatgcca

SEQ ID NO: 3391 - RNA, 18 nt, synthetic construct
  modified_base 1: mod_base = OTHER; note = thymine
  misc_feature 1..18: note = Antisense oligonucleotide
  modified_base 1: mod_base = OTHER; note = misc_feature - bicyclic nucleic acid scaffold modification
  modified_base 6: mod_base = OTHER; note = misc_feature - bicyclic nucleic acid scaffold modification
  modified_base 18: mod_base = OTHER; note = misc_feature - bicyclic nucleic acid scaffold modification
  source 1..18: mol_type = other RNA
tgccgctgcccaatgcca

SEQ ID NO: 3392 - RNA, 18 nt, synthetic construct
  modified_base 1: mod_base = OTHER; note = thymine
  misc_feature 1..18: note = Antisense oligonucleotide
  modified_base 1: mod_base = OTHER; note = misc_feature - bicyclic nucleic acid scaffold modification
  modified_base 6: mod_base = OTHER; note = misc_feature - bicyclic nucleic acid scaffold modification
  modified_base 11: mod_base = OTHER; note = misc_feature - bicyclic nucleic acid scaffold modification
  modified_base 18: mod_base = OTHER; note = misc_feature - bicyclic nucleic acid scaffold modification
  source 1..18: mol_type = other RNA
tgccgctgcccaatgcca

SEQ ID NO: 3393 - RNA, 18 nt, synthetic construct
  modified_base 1: mod_base = OTHER; note = thymine
  misc_feature 1..18: note = Antisense oligonucleotide
  modified_base 1..2: mod_base = OTHER; note = misc_feature - bicyclic nucleic acid scaffold modification
  modified_base 8: mod_base = OTHER; note = misc_feature - bicyclic nucleic acid scaffold modification
  modified_base 15: mod_base = OTHER; note = misc_feature - bicyclic nucleic acid scaffold modification
  modified_base 18: mod_base = OTHER; note = misc_feature - bicyclic nucleic acid scaffold modification
  source 1..18: mol_type = other RNA
tgccgctgcccaatgcca

SEQ ID NO: 3394 - RNA, 18 nt, synthetic construct
  modified_base 1: mod_base = OTHER; note = thymine
  misc_feature 1..18: note = Antisense oligonucleotide
  modified_base 1..2: mod_base = OTHER; note = misc_feature - bicyclic nucleic acid scaffold modification
  modified_base 17..18: mod_base = OTHER; note = misc_feature - bicyclic nucleic acid scaffold modification
  source 1..18: mol_type = other RNA
tgccgctgcccaatgcca

SEQ ID NO: 3395 - RNA, 18 nt, synthetic construct
  modified_base 1: mod_base = OTHER; note = thymine
  misc_feature 1..18: note = Antisense oligonucleotide
  modified_base 1..2: mod_base = OTHER; note = misc_feature - bicyclic nucleic acid scaffold modification
  modified_base 8: mod_base = OTHER; note = misc_feature - bicyclic nucleic acid scaffold modification
  modified_base 17..18: mod_base = OTHER; note = misc_feature - bicyclic nucleic acid scaffold modification
  source 1..18: mol_type = other RNA
tgccgctgcccaatgcca

SEQ ID NO: 3396 - RNA, 18 nt, synthetic construct
  modified_base 18: mod_base = OTHER; note = thymine
  misc_feature 1..18: note = Antisense oligonucleotide
  modified_base 1: mod_base = OTHER; note = misc_feature - bicyclic nucleic acid scaffold modification
  modified_base 18: mod_base = OTHER; note = misc_feature - bicyclic nucleic acid scaffold modification
  source 1..18: mol_type = other RNA
gccgctgcccaatgccat

SEQ ID NO: 3397 - RNA, 18 nt, synthetic construct
  modified_base 18: mod_base = OTHER; note = thymine
  misc_feature 1..18: note = Antisense oligonucleotide
  modified_base 1: mod_base = OTHER; note = misc_feature - bicyclic nucleic acid scaffold modification
  modified_base 4: mod_base = OTHER; note = misc_feature - bicyclic nucleic acid scaffold modification
  modified_base 18: mod_base = OTHER; note = misc_feature - bicyclic nucleic acid scaffold modification
  source 1..18: mol_type = other RNA
gccgctgcccaatgccat

SEQ ID NO: 3398 - RNA, 18 nt, synthetic construct
  modified_base 18: mod_base = OTHER; note = thymine
  misc_feature 1..18: note = Antisense oligonucleotide
  modified_base 1: mod_base = OTHER; note = misc_feature - bicyclic nucleic acid scaffold modification
  modified_base 7: mod_base = OTHER; note = misc_feature - bicyclic nucleic acid scaffold modification
  modified_base 18: mod_base = OTHER; note = misc_feature - bicyclic nucleic acid scaffold modification
  source 1..18: mol_type = other RNA
gccgctgcccaatgccat

SEQ ID NO: 3399 - RNA, 18 nt, synthetic construct
  modified_base 18: mod_base = OTHER; note = thymine
  misc_feature 1..18: note = Antisense oligonucleotide
  modified_base 1: mod_base = OTHER; note = misc_feature - bicyclic nucleic acid scaffold modification
  modified_base 14: mod_base = OTHER; note = misc_feature - bicyclic nucleic acid scaffold modification
  modified_base 18: mod_base = OTHER; note = misc_feature - bicyclic nucleic acid scaffold modification
  source 1..18: mol_type = other RNA
gccgctgcccaatgccat

SEQ ID NO: 3400 - RNA, 18 nt, synthetic construct
  modified_base 18: mod_base = OTHER; note = thymine
  misc_feature 1..18: note = Antisense oligonucleotide
  modified_base 1: mod_base = OTHER; note = misc_feature - bicyclic nucleic acid scaffold modification
  modified_base 5: mod_base = OTHER; note = misc_feature - bicyclic nucleic acid scaffold modification
  modified_base 18: mod_base = OTHER; note = misc_feature - bicyclic nucleic acid scaffold modification
  source 1..18: mol_type = other RNA
gccgctgcccaatgccat

SEQ ID NO: 3401 - RNA, 18 nt, synthetic construct
  modified_base 18: mod_base = OTHER; note = thymine
  misc_feature 1..18: note = Antisense oligonucleotide
  modified_base 1: mod_base = OTHER; note = misc_feature - bicyclic nucleic acid scaffold modification
  modified_base 10: mod_base = OTHER; note = misc_feature - bicyclic nucleic acid scaffold modification
  modified_base 18: mod_base = OTHER; note = misc_feature - bicyclic nucleic acid scaffold modification
  source 1..18: mol_type = other RNA
gccgctgcccaatgccat

SEQ ID NO: 3402 - RNA, 18 nt, synthetic construct
  modified_base 18: mod_base = OTHER; note = thymine
  misc_feature 1..18: note = Antisense oligonucleotide
  modified_base 1: mod_base = OTHER; note = misc_feature - bicyclic nucleic acid scaffold modification
  modified_base 16: mod_base = OTHER; note = misc_feature - bicyclic nucleic acid scaffold modification
  modified_base 18: mod_base = OTHER; note = misc_feature - bicyclic nucleic acid scaffold modification
  source 1..18: mol_type = other RNA
gccgctgcccaatgccat

SEQ ID NO: 3403 - RNA, 18 nt, synthetic construct
  modified_base 18: mod_base = OTHER; note = thymine
  misc_feature 1..18: note = Antisense oligonucleotide
  modified_base 1: mod_base = OTHER; note = misc_feature - bicyclic nucleic acid scaffold modification
  modified_base 10: mod_base = OTHER; note = misc_feature - bicyclic nucleic acid scaffold modification
  modified_base 16: mod_base = OTHER; note = misc_feature - bicyclic nucleic acid scaffold modification
  modified_base 18: mod_base = OTHER; note = misc_feature - bicyclic nucleic acid scaffold modification
  source 1..18: mol_type = other RNA
gccgctgcccaatgccat

SEQ ID NO: 3404 - RNA, 18 nt, synthetic construct
  modified_base 18: mod_base = OTHER; note = thymine
  misc_feature 1..18: note = Antisense oligonucleotide
  modified_base 1: mod_base = OTHER; note = misc_feature - bicyclic nucleic acid scaffold modification
  modified_base 5: mod_base = OTHER; note = misc_feature - bicyclic nucleic acid scaffold modification
  modified_base 10: mod_base = OTHER; note = misc_feature - bicyclic nucleic acid scaffold modification
  modified_base 18: mod_base = OTHER; note = misc_feature - bicyclic nucleic acid scaffold modification
  source 1..18: mol_type = other RNA
gccgctgcccaatgccat

SEQ ID NO: 3405 - RNA, 18 nt, synthetic construct
  modified_base 18: mod_base = OTHER; note = thymine
  misc_feature 1..18: note = Antisense oligonucleotide
  modified_base 1: mod_base = OTHER; note = misc_feature - bicyclic nucleic acid scaffold modification
  modified_base 4: mod_base = OTHER; note = misc_feature - bicyclic nucleic acid scaffold modification
  modified_base 14: mod_base = OTHER; note = misc_feature - bicyclic nucleic acid scaffold modification
  modified_base 18: mod_base = OTHER; note = misc_feature - bicyclic nucleic acid scaffold modification
  source 1..18: mol_type = other RNA
gccgctgcccaatgccat

SEQ ID NO: 3406 - RNA, 18 nt, synthetic construct
  modified_base 18: mod_base = OTHER; note = thymine
  misc_feature 1..18: note = Antisense oligonucleotide
  modified_base 1: mod_base = OTHER; note = misc_feature - bicyclic nucleic acid scaffold modification
  modified_base 7: mod_base = OTHER; note = misc_feature - bicyclic nucleic acid scaffold modification
  modified_base 14: mod_base = OTHER; note = misc_feature - bicyclic nucleic acid scaffold modification
  modified_base 18: mod_base = OTHER; note = misc_feature - bicyclic nucleic acid scaffold modification
  source 1..18: mol_type = other RNA
gccgctgcccaatgccat

SEQ ID NO: 3407 - RNA, 18 nt, synthetic construct
  modified_base 18: mod_base = OTHER; note = thymine
  misc_feature 1..18: note = Antisense oligonucleotide
  modified_base 1..2: mod_base = OTHER; note = misc_feature - bicyclic nucleic acid scaffold modification
  modified_base 17..18: mod_base = OTHER; note = misc_feature - bicyclic nucleic acid scaffold modification
  source 1..18: mol_type = other RNA
gccgctgcccaatgccat

SEQ ID NO: 3408 - RNA, 18 nt, synthetic construct
  modified_base 18: mod_base = OTHER; note = thymine
  misc_feature 1..18: note = Antisense oligonucleotide
  modified_base 1..2: mod_base = OTHER; note = misc_feature - bicyclic nucleic acid scaffold modification
  modified_base 10: mod_base = OTHER; note = misc_feature - bicyclic nucleic acid scaffold modification
  modified_base 17..18: mod_base = OTHER; note = misc_feature - bicyclic nucleic acid scaffold modification
  source 1..18: mol_type = other RNA
gccgctgcccaatgccat

SEQ ID NO: 3409 - RNA, 18 nt, synthetic construct
  modified_base 18: mod_base = OTHER; note = thymine
  misc_feature 1..18: note = Antisense oligonucleotide
  modified_base 1..2: mod_base = OTHER; note = misc_feature - bicyclic nucleic acid scaffold modification
  modified_base 7: mod_base = OTHER; note = misc_feature - bicyclic nucleic acid scaffold modification
  modified_base 17..18: mod_base = OTHER; note = misc_feature - bicyclic nucleic acid scaffold modification
  source 1..18: mol_type = other RNA
gccgctgcccaatgccat

SEQ ID NO: 3410 - RNA, 18 nt, synthetic construct
  misc_feature 1..18: note = Antisense oligonucleotide
  modified_base 1: mod_base = OTHER; note = misc_feature - bicyclic nucleic acid scaffold modification
  modified_base 18: mod_base = OTHER; note = misc_feature - bicyclic nucleic acid scaffold modification
  source 1..18: mol_type = other RNA
ccgctgcccaatgccatc

SEQ ID NO: 3411 - RNA, 18 nt, synthetic construct
  misc_feature 1..18: note = Antisense oligonucleotide
  modified_base 1: mod_base = OTHER; note = misc_feature - bicyclic nucleic acid scaffold modification
  modified_base 3: mod_base = OTHER; note = misc_feature - bicyclic nucleic acid scaffold modification
  modified_base 18: mod_base = OTHER; note = misc_feature - bicyclic nucleic acid scaffold modification
  source 1..18: mol_type = other RNA
ccgctgcccaatgccatc

SEQ ID NO: 3412 - RNA, 18 nt, synthetic construct
  misc_feature 1..18: note = Antisense oligonucleotide
  modified_base 1: mod_base = OTHER; note = misc_feature - bicyclic nucleic acid scaffold modification
  modified_base 6: mod_base = OTHER; note = misc_feature - bicyclic nucleic acid scaffold modification
  modified_base 18: mod_base = OTHER; note = misc_feature - bicyclic nucleic acid scaffold modification
  source 1..18: mol_type = other RNA
ccgctgcccaatgccatc

SEQ ID NO: 3413 - RNA, 18 nt, synthetic construct
  misc_feature 1..18: note = Antisense oligonucleotide
  modified_base 1: mod_base = OTHER; note = misc_feature - bicyclic nucleic acid scaffold modification
  modified_base 13: mod_base = OTHER; note = misc_feature - bicyclic nucleic acid scaffold modification
  modified_base 18: mod_base = OTHER; note = misc_feature - bicyclic nucleic acid scaffold modification
  source 1..18: mol_type = other RNA
ccgctgcccaatgccatc

SEQ ID NO: 3414 - RNA, 18 nt, synthetic construct
  misc_feature 1..18: note = Antisense oligonucleotide
  modified_base 1: mod_base = OTHER; note = misc_feature - bicyclic nucleic acid scaffold modification
  modified_base 4: mod_base = OTHER; note = misc_feature - bicyclic nucleic acid scaffold modification
  modified_base 18: mod_base = OTHER; note = misc_feature - bicyclic nucleic acid scaffold modification
  source 1..18: mol_type = other RNA
ccgctgcccaatgccatc

SEQ ID NO: 3415 - RNA, 18 nt, synthetic construct
  misc_feature 1..18: note = Antisense oligonucleotide
  modified_base 1: mod_base = OTHER; note = misc_feature - bicyclic nucleic acid scaffold modification
  modified_base 9: mod_base = OTHER; note = misc_feature - bicyclic nucleic acid scaffold modification
  modified_base 18: mod_base = OTHER; note = misc_feature - bicyclic nucleic acid scaffold modification
  source 1..18: mol_type = other RNA
ccgctgcccaatgccatc

SEQ ID NO: 3416 - RNA, 18 nt, synthetic construct
  misc_feature 1..18: note = Antisense oligonucleotide
  modified_base 1: mod_base = OTHER; note = misc_feature - bicyclic nucleic acid scaffold modification
  modified_base 15: mod_base = OTHER; note = misc_feature - bicyclic nucleic acid scaffold modification
  modified_base 18: mod_base = OTHER; note = misc_feature - bicyclic nucleic acid scaffold modification
  source 1..18: mol_type = other RNA
ccgctgcccaatgccatc

SEQ ID NO: 3417 - RNA, 18 nt, synthetic construct
  misc_feature 1..18: note = Antisense oligonucleotide
  modified_base 1: mod_base = OTHER; note = misc_feature - bicyclic nucleic acid scaffold modification
  modified_base 6: mod_base = OTHER; note = misc_feature - bicyclic nucleic acid scaffold modification
  modified_base 13: mod_base = OTHER; note = misc_feature - bicyclic nucleic acid scaffold modification
  modified_base 18: mod_base = OTHER; note = misc_feature - bicyclic nucleic acid scaffold modification
  source 1..18: mol_type = other RNA
ccgctgcccaatgccatc

SEQ ID NO: 3418 - RNA, 18 nt, synthetic construct
  misc_feature 1..18: note = Antisense oligonucleotide
  modified_base 1: mod_base = OTHER; note = misc_feature - bicyclic nucleic acid scaffold modification
  modified_base 4: mod_base = OTHER; note = misc_feature - bicyclic nucleic acid scaffold modification
  modified_base 9: mod_base = OTHER; note = misc_feature - bicyclic nucleic acid scaffold modification
  modified_base 18: mod_base = OTHER; note = misc_feature - bicyclic nucleic acid scaffold modification
  source 1..18: mol_type = other RNA
ccgctgcccaatgccatc

SEQ ID NO: 3419 - RNA, 18 nt, synthetic construct
  misc_feature 1..18: note = Antisense oligonucleotide
  modified_base 1: mod_base = OTHER; note = misc_feature - bicyclic nucleic acid scaffold modification
  modified_base 9: mod_base = OTHER; note = misc_feature - bicyclic nucleic acid scaffold modification
  modified_base 15: mod_base = OTHER; note = misc_feature - bicyclic nucleic acid scaffold modification
  modified_base 18: mod_base = OTHER; note = misc_feature - bicyclic nucleic acid scaffold modification
  source 1..18: mol_type = other RNA
ccgctgcccaatgccatc

SEQ ID NO: 3420 - RNA, 18 nt, synthetic construct
  modified_base 17: mod_base = OTHER; note = thymine
  misc_feature 1..18: note = Antisense oligonucleotide
  modified_base 1..2: mod_base = OTHER; note = misc_feature - bicyclic nucleic acid scaffold modification
  modified_base 17..18: mod_base = OTHER; note = misc_feature - bicyclic nucleic acid scaffold modification
  source 1..18: mol_type = other RNA
ccgctgcccaatgccatc

SEQ ID NO: 3421 - RNA, 18 nt, synthetic construct
  modified_base 17: mod_base = OTHER; note = thymine
  misc_feature 1..18: note = Antisense oligonucleotide
  modified_base 1..2: mod_base = OTHER; note = misc_feature - bicyclic nucleic acid scaffold modification
  modified_base 9: mod_base = OTHER; note = misc_feature - bicyclic nucleic acid scaffold modification
  modified_base 17..18: mod_base = OTHER; note = misc_feature - bicyclic nucleic acid scaffold modification
  source 1..18: mol_type = other RNA
ccgctgcccaatgccatc

SEQ ID NO: 3422 - RNA, 18 nt, synthetic construct
  misc_feature 1..18: note = Antisense oligonucleotide
  modified_base 1: mod_base = OTHER; note = misc_feature - bicyclic nucleic acid scaffold modification
  modified_base 18: mod_base = OTHER; note = misc_feature - bicyclic nucleic acid scaffold modification
  source 1..18: mol_type = other RNA
cgctgcccaatgccatcc

SEQ ID NO: 3423 - RNA, 18 nt, synthetic construct
  misc_feature 1..18: note = Antisense oligonucleotide
  modified_base 1: mod_base = OTHER; note = misc_feature - bicyclic nucleic acid scaffold modification
  modified_base 5: mod_base = OTHER; note = misc_feature - bicyclic nucleic acid scaffold modification
  modified_base 18: mod_base = OTHER; note = misc_feature - bicyclic nucleic acid scaffold modification
  source 1..18: mol_type = other RNA
cgctgcccaatgccatcc

SEQ ID NO: 3424 - RNA, 18 nt, synthetic construct
  misc_feature 1..18: note = Antisense oligonucleotide
  modified_base 1: mod_base = OTHER; note = misc_feature - bicyclic nucleic acid scaffold modification
  modified_base 12: mod_base = OTHER; note = misc_feature - bicyclic nucleic acid scaffold modification
  modified_base 18: mod_base = OTHER; note = misc_feature - bicyclic nucleic acid scaffold modification
  source 1..18: mol_type = other RNA
cgctgcccaatgccatcc

SEQ ID NO: 3425 - RNA, 18 nt, synthetic construct
  misc_feature 1..18: note = Antisense oligonucleotide
  modified_base 1: mod_base = OTHER; note = misc_feature - bicyclic nucleic acid scaffold modification
  modified_base 14: mod_base = OTHER; note = misc_feature - bicyclic nucleic acid scaffold modification
  modified_base 18: mod_base = OTHER; note = misc_feature - bicyclic nucleic acid scaffold modification
  source 1..18: mol_type = other RNA
cgctgcccaatgccatcc

SEQ ID NO: 3426 - RNA, 18 nt, synthetic construct
  misc_feature 1..18: note = Antisense oligonucleotide
  modified_base 1: mod_base = OTHER; note = misc_feature - bicyclic nucleic acid scaffold modification
  modified_base 8: mod_base = OTHER; note = misc_feature - bicyclic nucleic acid scaffold modification
  modified_base 18: mod_base = OTHER; note = misc_feature - bicyclic nucleic acid scaffold modification
  source 1..18: mol_type = other RNA
cgctgcccaatgccatcc

SEQ ID NO: 3427 - RNA, 18 nt, synthetic construct
  misc_feature 1..18: note = Antisense oligonucleotide
  modified_base 1: mod_base = OTHER; note = misc_feature - bicyclic nucleic acid scaffold modification
  modified_base 3: mod_base = OTHER; note = misc_feature - bicyclic nucleic acid scaffold modification
  modified_base 18: mod_base = OTHER; note = misc_feature - bicyclic nucleic acid scaffold modification
  source 1..18: mol_type = other RNA
cgctgcccaatgccatcc

SEQ ID NO: 3428 - RNA, 18 nt, synthetic construct
  misc_feature 1..18: note = Antisense oligonucleotide
  modified_base 1..2: mod_base = OTHER; note = misc_feature - bicyclic nucleic acid scaffold modification
  modified_base 5: mod_base = OTHER; note = misc_feature - bicyclic nucleic acid scaffold modification
  modified_base 18: mod_base = OTHER; note = misc_feature - bicyclic nucleic acid scaffold modification
  source 1..18: mol_type = other RNA
cgctgcccaatgccatcc

SEQ ID NO: 3429 - RNA, 18 nt, synthetic construct
  misc_feature 1..18: note = Antisense oligonucleotide
  modified_base 1: mod_base = OTHER; note = misc_feature - bicyclic nucleic acid scaffold modification
  modified_base 5: mod_base = OTHER; note = misc_feature - bicyclic nucleic acid scaffold modification
  modified_base 12: mod_base = OTHER; note = misc_feature - bicyclic nucleic acid scaffold modification
  modified_base 18: mod_base = OTHER; note = misc_feature - bicyclic nucleic acid scaffold modification
  source 1..18: mol_type = other RNA
cgctgcccaatgccatcc

SEQ ID NO: 3430 - RNA, 18 nt, synthetic construct
  misc_feature 1..18: note = Antisense oligonucleotide
  modified_base 1: mod_base = OTHER; note = misc_feature - bicyclic nucleic acid scaffold modification
  modified_base 8: mod_base = OTHER; note = misc_feature - bicyclic nucleic acid scaffold modification
  modified_base 14: mod_base = OTHER; note = misc_feature - bicyclic nucleic acid scaffold modification
  modified_base 18: mod_base = OTHER; note = misc_feature - bicyclic nucleic acid scaffold modification
  source 1..18: mol_type = other RNA
cgctgcccaatgccatcc

SEQ ID NO: 3431 - RNA, 18 nt, synthetic construct
  misc_feature 1..18: note = Antisense oligonucleotide
  modified_base 1: mod_base = OTHER; note = misc_feature - bicyclic nucleic acid scaffold modification
  modified_base 3: mod_base = OTHER; note = misc_feature - bicyclic nucleic acid scaffold modification
  modified_base 8: mod_base = OTHER; note = misc_feature - bicyclic nucleic acid scaffold modification
  modified_base 18: mod_base = OTHER; note = misc_feature - bicyclic nucleic acid scaffold modification
  source 1..18: mol_type = other RNA
cgctgcccaatgccatcc

SEQ ID NO: 3432 - RNA, 18 nt, synthetic construct
  misc_feature 1..18: note = Antisense oligonucleotide
  modified_base 1: mod_base = OTHER; note = misc_feature - bicyclic nucleic acid scaffold modification
  modified_base 3: mod_base = OTHER; note = misc_feature - bicyclic nucleic acid scaffold modification
  modified_base 14: mod_base = OTHER; note = misc_feature - bicyclic nucleic acid scaffold modification
  modified_base 18: mod_base = OTHER; note = misc_feature - bicyclic nucleic acid scaffold modification
  source 1..18: mol_type = other RNA
cgctgcccaatgccatcc

SEQ ID NO: 3433 - RNA, 18 nt, synthetic construct
  misc_feature 1..18: note = Antisense oligonucleotide
  modified_base 1..2: mod_base = OTHER; note = misc_feature - bicyclic nucleic acid scaffold modification
  modified_base 17..18: mod_base = OTHER; note = misc_feature - bicyclic nucleic acid scaffold modification
  source 1..18: mol_type = other RNA
cgctgcccaatgccatcc

SEQ ID NO: 3434 - RNA, 18 nt, synthetic construct
  misc_feature 1..18: note = Antisense oligonucleotide
  modified_base 1..2: mod_base = OTHER; note = misc_feature - bicyclic nucleic acid scaffold modification
  modified_base 8: mod_base = OTHER; note = misc_feature - bicyclic nucleic acid scaffold modification
  modified_base 17..18: mod_base = OTHER; note = misc_feature - bicyclic nucleic acid scaffold modification
  source 1..18: mol_type = other RNA
cgctgcccaatgccatcc

SEQ ID NO: 3435 - RNA, 18 nt, synthetic construct
  misc_feature 1..18: note = Antisense oligonucleotide
  modified_base 1..2: mod_base = OTHER; note = misc_feature - bicyclic nucleic acid scaffold modification
  modified_base 12: mod_base = OTHER; note = misc_feature - bicyclic nucleic acid scaffold modification
  modified_base 17..18: mod_base = OTHER; note = misc_feature - bicyclic nucleic acid scaffold modification
  source 1..18: mol_type = other RNA
cgctgcccaatgccatcc

SEQ ID NO: 3436 - RNA, 18 nt, synthetic construct
  modified_base 18: mod_base = OTHER; note = thymine
  misc_feature 1..18: note = Antisense oligonucleotide
  modified_base 1: mod_base = OTHER; note = misc_feature - bicyclic nucleic acid scaffold modification
  modified_base 18: mod_base = OTHER; note = misc_feature - bicyclic nucleic acid scaffold modification
  source 1..18: mol_type = other RNA
gctgcccaatgccatcct

SEQ ID NO: 3437 - RNA, 18 nt, synthetic construct
  modified_base 18: mod_base = OTHER; note = thymine
  misc_feature 1..18: note = Antisense oligonucleotide
  modified_base 1: mod_base = OTHER; note = misc_feature - bicyclic nucleic acid scaffold modification
  modified_base 4: mod_base = OTHER; note = misc_feature - bicyclic nucleic acid scaffold modification
  modified_base 18: mod_base = OTHER; note = misc_feature - bicyclic nucleic acid scaffold modification
  source 1..18: mol_type = other RNA
gctgcccaatgccatcct

SEQ ID NO: 3438 - RNA, 18 nt, synthetic construct
  modified_base 18: mod_base = OTHER; note = thymine
  misc_feature 1..18: note = Antisense oligonucleotide
  modified_base 1: mod_base = OTHER; note = misc_feature - bicyclic nucleic acid scaffold modification
  modified_base 11: mod_base = OTHER; note = misc_feature - bicyclic nucleic acid scaffold modification
  modified_base 18: mod_base = OTHER; note = misc_feature - bicyclic nucleic acid scaffold modification
  source 1..18: mol_type = other RNA
gctgcccaatgccatcct

SEQ ID NO: 3439 - RNA, 18 nt, synthetic construct
  modified_base 18: mod_base = OTHER; note = thymine
  misc_feature 1..18: note = Antisense oligonucleotide
  modified_base 1: mod_base = OTHER; note = misc_feature - bicyclic nucleic acid scaffold modification
  modified_base 4: mod_base = OTHER; note = misc_feature - bicyclic nucleic acid scaffold modification
  modified_base 11: mod_base = OTHER; note = misc_feature - bicyclic nucleic acid scaffold modification
  modified_base 18: mod_base = OTHER; note = misc_feature - bicyclic nucleic acid scaffold modification
  source 1..18: mol_type = other RNA
gctgcccaatgccatcct

SEQ ID NO: 3440 - RNA, 18 nt, synthetic construct
  modified_base 18: mod_base = OTHER; note = thymine
  misc_feature 1..18: note = Antisense oligonucleotide
  modified_base 1: mod_base = OTHER; note = misc_feature - bicyclic nucleic acid scaffold modification
  modified_base 7: mod_base = OTHER; note = misc_feature - bicyclic nucleic acid scaffold modification
  modified_base 18: mod_base = OTHER; note = misc_feature - bicyclic nucleic acid scaffold modification
  source 1..18: mol_type = other RNA
gctgcccaatgccatcct

SEQ ID NO: 3441 - RNA, 18 nt, synthetic construct
  modified_base 18: mod_base = OTHER; note = thymine
  misc_feature 1..18: note = Antisense oligonucleotide
  modified_base 1: mod_base = OTHER; note = misc_feature - bicyclic nucleic acid scaffold modification
  modified_base 13: mod_base = OTHER; note = misc_feature - bicyclic nucleic acid scaffold modification
  modified_base 18: mod_base = OTHER; note = misc_feature - bicyclic nucleic acid scaffold modification
  source 1..18: mol_type = other RNA
gctgcccaatgccatcct

SEQ ID NO: 3442 - RNA, 18 nt, synthetic construct
  modified_base 18: mod_base = OTHER; note = thymine
  misc_feature 1..18: note = Antisense oligonucleotide
  modified_base 1: mod_base = OTHER; note = misc_feature - bicyclic nucleic acid scaffold modification
  modified_base 16: mod_base = OTHER; note = misc_feature - bicyclic nucleic acid scaffold modification
  modified_base 18: mod_base = OTHER; note = misc_feature - bicyclic nucleic acid scaffold modification
  source 1..18: mol_type = other RNA
gctgcccaatgccatcct

SEQ ID NO: 3443 - RNA, 18 nt, synthetic construct
  modified_base 18: mod_base = OTHER; note = thymine
  misc_feature 1..18: note = Antisense oligonucleotide
  modified_base 1: mod_base = OTHER; note = misc_feature - bicyclic nucleic acid scaffold modification
  modified_base 7: mod_base = OTHER; note = misc_feature - bicyclic nucleic acid scaffold modification
  modified_base 13: mod_base = OTHER; note = misc_feature - bicyclic nucleic acid scaffold modification
  modified_base 18: mod_base = OTHER; note = misc_feature - bicyclic nucleic acid scaffold modification
  source 1..18: mol_type = other RNA
gctgcccaatgccatcct

SEQ ID NO: 3444 - RNA, 18 nt, synthetic construct
  modified_base 18: mod_base = OTHER; note = thymine
  misc_feature 1..18: note = Antisense oligonucleotide
  modified_base 1..2: mod_base = OTHER; note = misc_feature - bicyclic nucleic acid scaffold modification
  modified_base 17..18: mod_base = OTHER; note = misc_feature - bicyclic nucleic acid scaffold modification
  source 1..18: mol_type = other RNA
gctgcccaatgccatcct

SEQ ID NO: 3445 - RNA, 18 nt, synthetic construct
  modified_base 18: mod_base = OTHER; note = thymine
  misc_feature 1..18: note = Antisense oligonucleotide
  modified_base 1..2: mod_base = OTHER; note = misc_feature - bicyclic nucleic acid scaffold modification
  modified_base 11: mod_base = OTHER; note = misc_feature - bicyclic nucleic acid scaffold modification
  modified_base 17..18: mod_base = OTHER; note = misc_feature - bicyclic nucleic acid scaffold modification
  source 1..18: mol_type = other RNA
gctgcccaatgccatcct

SEQ ID NO: 3446 - RNA, 18 nt, synthetic construct
  modified_base 18: mod_base = OTHER; note = thymine
  misc_feature 1..18: note = Antisense oligonucleotide
  modified_base 1..2: mod_base = OTHER; note = misc_feature - bicyclic nucleic acid scaffold modification
  modified_base 7: mod_base = OTHER; note = misc_feature - bicyclic nucleic acid scaffold modification
  modified_base 17..18: mod_base = OTHER; note = misc_feature - bicyclic nucleic acid scaffold modification
  source 1..18: mol_type = other RNA
gctgcccaatgccatcct

SEQ ID NO: 3447 - RNA, 18 nt, synthetic construct
  misc_feature 1..18: note = Antisense oligonucleotide
  modified_base 1: mod_base = OTHER; note = misc_feature - bicyclic nucleic acid scaffold modification
  modified_base 18: mod_base = OTHER; note = misc_feature - bicyclic nucleic acid scaffold modification
  source 1..18: mol_type = other RNA
ctgcccaatgccatcctg

SEQ ID NO: 3448 - RNA, 18 nt, synthetic construct
  misc_feature 1..18: note = Antisense oligonucleotide
  modified_base 1: mod_base = OTHER; note = misc_feature - bicyclic nucleic acid scaffold modification
  modified_base 3: mod_base = OTHER; note = misc_feature - bicyclic nucleic acid scaffold modification
  modified_base 18: mod_base = OTHER; note = misc_feature - bicyclic nucleic acid scaffold modification
  source 1..18: mol_type = other RNA
ctgcccaatgccatcctg

SEQ ID NO: 3449 - RNA, 18 nt, synthetic construct
  misc_feature 1..18: note = Antisense oligonucleotide
  modified_base 1: mod_base = OTHER; note = misc_feature - bicyclic nucleic acid scaffold modification
  modified_base 10: mod_base = OTHER; note = misc_feature - bicyclic nucleic acid scaffold modification
  modified_base 18: mod_base = OTHER; note = misc_feature - bicyclic nucleic acid scaffold modification
  source 1..18: mol_type = other RNA
ctgcccaatgccatcctg

SEQ ID NO: 3450 - RNA, 18 nt, synthetic construct
  misc_feature 1..18: note = Antisense oligonucleotide
  modified_base 1: mod_base = OTHER; note = misc_feature - bicyclic nucleic acid scaffold modification
  modified_base 3: mod_base = OTHER; note = misc_feature - bicyclic nucleic acid scaffold modification
  modified_base 10: mod_base = OTHER; note = misc_feature - bicyclic nucleic acid scaffold modification
  modified_base 18: mod_base = OTHER; note = misc_feature - bicyclic nucleic acid scaffold modification
  source 1..18: mol_type = other RNA
ctgcccaatgccatcctg

SEQ ID NO: 3451 - RNA, 18 nt, synthetic construct
  misc_feature 1..18: note = Antisense oligonucleotide
  modified_base 1: mod_base = OTHER; note = misc_feature - bicyclic nucleic acid scaffold modification
  modified_base 6: mod_base = OTHER; note = misc_feature - bicyclic nucleic acid scaffold modification
  modified_base 18: mod_base = OTHER; note = misc_feature - bicyclic nucleic acid scaffold modification
  source 1..18: mol_type = other RNA
ctgcccaatgccatcctg

SEQ ID NO: 3452 - RNA, 18 nt, synthetic construct
  misc_feature 1..18: note = Antisense oligonucleotide
  modified_base 1: mod_base = OTHER; note = misc_feature - bicyclic nucleic acid scaffold modification
  modified_base 12: mod_base = OTHER; note = misc_feature - bicyclic nucleic acid scaffold modification
  modified_base 18: mod_base = OTHER; note = misc_feature - bicyclic nucleic acid scaffold modification
  source 1..18: mol_type = other RNA
ctgcccaatgccatcctg

SEQ ID NO: 3453 - RNA, 18 nt, synthetic construct
  misc_feature 1..18: note = Antisense oligonucleotide
  modified_base 1: mod_base = OTHER; note = misc_feature - bicyclic nucleic acid scaffold modification
  modified_base 16: mod_base = OTHER; note = misc_feature - bicyclic nucleic acid scaffold modification
  modified_base 18: mod_base = OTHER; note = misc_feature - bicyclic nucleic acid scaffold modification
  source 1..18: mol_type = other RNA
ctgcccaatgccatcctg

SEQ ID NO: 3454 - RNA, 18 nt, synthetic construct
  misc_feature 1..18: note = Antisense oligonucleotide
  modified_base 1: mod_base = OTHER; note = misc_feature - bicyclic nucleic acid scaffold modification
  modified_base 6: mod_base = OTHER; note = misc_feature - bicyclic nucleic acid scaffold modification
  modified_base 12: mod_base = OTHER; note = misc_feature - bicyclic nucleic acid scaffold modification
  modified_base 18: mod_base = OTHER; note = misc_feature - bicyclic nucleic acid scaffold modification
  source 1..18: mol_type = other RNA
ctgcccaatgccatcctg

SEQ ID NO: 3455 - RNA, 18 nt, synthetic construct
  misc_feature 1..18: note = Antisense oligonucleotide
  modified_base 1: mod_base = OTHER; note = misc_feature - bicyclic nucleic acid scaffold modification
  modified_base 6: mod_base = OTHER; note = misc_feature - bicyclic nucleic acid scaffold modification
  modified_base 16: mod_base = OTHER; note = misc_feature - bicyclic nucleic acid scaffold modification
  modified_base 18: mod_base = OTHER; note = misc_feature - bicyclic nucleic acid scaffold modification
  source 1..18: mol_type = other RNA
ctgcccaatgccatcctg

SEQ ID NO: 3456 - RNA, 18 nt, synthetic construct
  modified_base 2: mod_base = OTHER; note = thymine
  modified_base 17: mod_base = OTHER; note = thymine
  misc_feature 1..18: note = Antisense oligonucleotide
  modified_base 1..2: mod_base = OTHER; note = misc_feature - bicyclic nucleic acid scaffold modification
  modified_base 17..18: mod_base = OTHER; note = misc_feature - bicyclic nucleic acid scaffold modification
  source 1..18: mol_type = other RNA
ctgcccaatgccatcctg

SEQ ID NO: 3457 - RNA, 18 nt, synthetic construct
  modified_base 2: mod_base = OTHER; note = thymine
  modified_base 17: mod_base = OTHER; note = thymine
  misc_feature 1..18: note = Antisense oligonucleotide
  modified_base 1..2: mod_base = OTHER; note = misc_feature - bicyclic nucleic acid scaffold modification
  modified_base 10: mod_base = OTHER; note = misc_feature - bicyclic nucleic acid scaffold modification
  modified_base 17..18: mod_base = OTHER; note = misc_feature - bicyclic nucleic acid scaffold modification
  source 1..18: mol_type = other RNA
ctgcccaatgccatcctg

SEQ ID NO: 3458 - RNA, 18 nt, synthetic construct
  modified_base 2: mod_base = OTHER; note = thymine
  modified_base 17: mod_base = OTHER; note = thymine
  misc_feature 1..18: note = Antisense oligonucleotide
  modified_base 1..2: mod_base = OTHER; note = misc_feature - bicyclic nucleic acid scaffold modification
  modified_base 6: mod_base = OTHER; note = misc_feature - bicyclic nucleic acid scaffold modification
  modified_base 12: mod_base = OTHER; note = misc_feature - bicyclic nucleic acid scaffold modification
  modified_base 17..18: mod_base = OTHER; note = misc_feature - bicyclic nucleic acid scaffold modification
  source 1..18: mol_type = other RNA
ctgcccaatgccatcctg

SEQ ID NO: 3459 - RNA, 16 nt, synthetic construct
  modified_base 1: mod_base = OTHER; note = thymine
  modified_base 16: mod_base = OTHER; note = thymine
  misc_feature 1..16: note = Antisense oligonucleotide
  modified_base 1: mod_base = OTHER; note = misc_feature - bicyclic nucleic acid scaffold modification
  modified_base 16: mod_base = OTHER; note = misc_feature - bicyclic nucleic acid scaffold modification
  source 1..16: mol_type = other RNA
tttgccgctgcccaat

SEQ ID NO: 3460 - RNA, 16 nt, synthetic construct
  modified_base 1: mod_base = OTHER; note = thymine
  modified_base 16: mod_base = OTHER; note = thymine
  misc_feature 1..16: note = Antisense oligonucleotide
  modified_base 1: mod_base = OTHER; note = misc_feature - bicyclic nucleic acid scaffold modification
  modified_base 4: mod_base = OTHER; note = misc_feature - bicyclic nucleic acid scaffold modification
  modified_base 16: mod_base = OTHER; note = misc_feature - bicyclic nucleic acid scaffold modification
  source 1..16: mol_type = other RNA
tttgccgctgcccaat

SEQ ID NO: 3461 - RNA, 16 nt, synthetic construct
  modified_base 1: mod_base = OTHER; note = thymine
  modified_base 16: mod_base = OTHER; note = thymine
  misc_feature 1..16: note = Antisense oligonucleotide
  modified_base 1: mod_base = OTHER; note = misc_feature - bicyclic nucleic acid scaffold modification
  modified_base 7: mod_base = OTHER; note = misc_feature - bicyclic nucleic acid scaffold modification
  modified_base 16: mod_base = OTHER; note = misc_feature - bicyclic nucleic acid scaffold modification
  source 1..16: mol_type = other RNA
tttgccgctgcccaat

SEQ ID NO: 3462 - RNA, 16 nt, synthetic construct
  modified_base 1: mod_base = OTHER; note = thymine
  modified_base 16: mod_base = OTHER; note = thymine
  misc_feature 1..16: note = Antisense oligonucleotide
  modified_base 1: mod_base = OTHER; note = misc_feature - bicyclic nucleic acid scaffold modification
  modified_base 10: mod_base = OTHER; note = misc_feature - bicyclic nucleic acid scaffold modification
  modified_base 16: mod_base = OTHER; note = misc_feature - bicyclic nucleic acid scaffold modification
  source 1..16: mol_type = other RNA
tttgccgctgcccaat

SEQ ID NO: 3463 - RNA, 16 nt, synthetic construct
  modified_base 1: mod_base = OTHER; note = thymine
  modified_base 16: mod_base = OTHER; note = thymine
  misc_feature 1..16: note = Antisense oligonucleotide
  modified_base 1: mod_base = OTHER; note = misc_feature - bicyclic nucleic acid scaffold modification
  modified_base 4: mod_base = OTHER; note = misc_feature - bicyclic nucleic acid scaffold modification
  modified_base 10: mod_base = OTHER; note = misc_feature - bicyclic nucleic acid scaffold modification
  modified_base 16: mod_base = OTHER; note = misc_feature - bicyclic nucleic acid scaffold modification
  source 1..16: mol_type = other RNA
tttgccgctgcccaat

SEQ ID NO: 3464 - RNA, 16 nt, synthetic construct
  modified_base 1: mod_base = OTHER; note = thymine
  modified_base 16: mod_base = OTHER; note = thymine
  misc_feature 1..16: note = Antisense oligonucleotide
  modified_base 1: mod_base = OTHER; note = misc_feature - bicyclic nucleic acid scaffold modification
  modified_base 13: mod_base = OTHER; note = misc_feature - bicyclic nucleic acid scaffold modification
  modified_base 16: mod_base = OTHER; note = misc_feature - bicyclic nucleic acid scaffold modification
  source 1..16: mol_type = other RNA
tttgccgctgcccaat

SEQ ID NO: 3465 - RNA, 16 nt, synthetic construct
  modified_base 1: mod_base = OTHER; note = thymine
  modified_base 16: mod_base = OTHER; note = thymine
  misc_feature 1..16: note = Antisense oligonucleotide
  modified_base 1: mod_base = OTHER; note = misc_feature - bicyclic nucleic acid scaffold modification
  modified_base 8: mod_base = OTHER; note = misc_feature - bicyclic nucleic acid scaffold modification
  modified_base 16: mod_base = OTHER; note = misc_feature - bicyclic nucleic acid scaffold modification
  source 1..16: mol_type = other RNA
tttgccgctgcccaat

SEQ ID NO: 3466 - RNA, 16 nt, synthetic construct
  modified_base 1: mod_base = OTHER; note = thymine
  modified_base 16: mod_base = OTHER; note = thymine
  misc_feature 1..16: note = Antisense oligonucleotide
  modified_base 1: mod_base = OTHER; note = misc_feature - bicyclic nucleic acid scaffold modification
  modified_base 8: mod_base = OTHER; note = misc_feature - bicyclic nucleic acid scaffold modification
  modified_base 13: mod_base = OTHER; note = misc_feature - bicyclic nucleic acid scaffold modification
  modified_base 16: mod_base = OTHER; note = misc_feature - bicyclic nucleic acid scaffold modification
  source 1..16: mol_type = other RNA
tttgccgctgcccaat

SEQ ID NO: 3467 - RNA, 16 nt, synthetic construct
  modified_base 1: mod_base = OTHER; note = thymine
  modified_base 16: mod_base = OTHER; note = thymine
  misc_feature 1..16: note = Antisense oligonucleotide
  modified_base 1: mod_base = OTHER; note = misc_feature - bicyclic nucleic acid scaffold modification
  modified_base 5: mod_base = OTHER; note = misc_feature - bicyclic nucleic acid scaffold modification
  modified_base 11: mod_base = OTHER; note = misc_feature - bicyclic nucleic acid scaffold modification
  modified_base 16: mod_base = OTHER; note = misc_feature - bicyclic nucleic acid scaffold modification
  source 1..16: mol_type = other RNA
tttgccgctgcccaat

SEQ ID NO: 3468 - RNA, 16 nt, synthetic construct
  modified_base 1..2: mod_base = OTHER; note = thymine
  modified_base 16: mod_base = OTHER; note = thymine
  misc_feature 1..16: note = Antisense oligonucleotide
  modified_base 1..2: mod_base = OTHER; note = misc_feature - bicyclic nucleic acid scaffold modification
  modified_base 15..16: mod_base = OTHER; note = misc_feature - bicyclic nucleic acid scaffold modification
  source 1..16: mol_type = other RNA
tttgccgctgcccaat

SEQ ID NO: 3469 - RNA, 16 nt, synthetic construct
  modified_base 1..2: mod_base = OTHER; note = thymine
  modified_base 16: mod_base = OTHER; note = thymine
  misc_feature 1..16: note = Antisense oligonucleotide
  modified_base 1..2: mod_base = OTHER; note = misc_feature - bicyclic nucleic acid scaffold modification
  modified_base 10: mod_base = OTHER; note = misc_feature - bicyclic nucleic acid scaffold modification
  modified_base 15..16: mod_base = OTHER; note = misc_feature - bicyclic nucleic acid scaffold modification
  source 1..16: mol_type = other RNA
tttgccgctgcccaat

SEQ ID NO: 3470 - RNA, 16 nt, synthetic construct
  modified_base 1: mod_base = OTHER; note = thymine
  modified_base 16: mod_base = OTHER; note = thymine
  misc_feature 1..16: note = Antisense oligonucleotide
  modified_base 1..2: mod_base = OTHER; note = misc_feature - bicyclic nucleic acid scaffold modification
  modified_base 7: mod_base = OTHER; note = misc_feature - bicyclic nucleic acid scaffold modification
  modified_base 15..16: mod_base = OTHER; note = misc_feature - bicyclic nucleic acid scaffold modification
  source 1..16: mol_type = other RNA
tttgccgctgcccaat

SEQ ID NO: 3471 - RNA, 16 nt, synthetic construct
  modified_base 1: mod_base = OTHER; note = thymine
  misc_feature 1..16: note = Antisense oligonucleotide
  modified_base 1: mod_base = OTHER; note = misc_feature - bicyclic nucleic acid scaffold modification
  modified_base 16: mod_base = OTHER; note = misc_feature - bicyclic nucleic acid scaffold modification
  source 1..16: mol_type = other RNA
ttgccgctgcccaatg

SEQ ID NO: 3472 - RNA, 16 nt, synthetic construct
  modified_base 1: mod_base = OTHER; note = thymine
  misc_feature 1..16: note = Antisense oligonucleotide
  modified_base 1: mod_base = OTHER; note = misc_feature - bicyclic nucleic acid scaffold modification
  modified_base 3: mod_base = OTHER; note = misc_feature - bicyclic nucleic acid scaffold modification
  modified_base 16: mod_base = OTHER; note = misc_feature - bicyclic nucleic acid scaffold modification
  source 1..16: mol_type = other RNA
ttgccgctgcccaatg

SEQ ID NO: 3473 - RNA, 16 nt, synthetic construct
  modified_base 1: mod_base = OTHER; note = thymine
  misc_feature 1..16: note = Antisense oligonucleotide
  modified_base 1: mod_base = OTHER; note = misc_feature - bicyclic nucleic acid scaffold modification
  modified_base 6: mod_base = OTHER; note = misc_feature - bicyclic nucleic acid scaffold modification
  modified_base 16: mod_base = OTHER; note = misc_feature - bicyclic nucleic acid scaffold modification
  source 1..16: mol_type = other RNA
ttgccgctgcccaatg

SEQ ID NO: 3474 - RNA, 16 nt, synthetic construct
  modified_base 1: mod_base = OTHER; note = thymine
  misc_feature 1..16: note = Antisense oligonucleotide
  modified_base 1: mod_base = OTHER; note = misc_feature - bicyclic nucleic acid scaffold modification
  modified_base 9: mod_base = OTHER; note = misc_feature - bicyclic nucleic acid scaffold modification
  modified_base 16: mod_base = OTHER; note = misc_feature - bicyclic nucleic acid scaffold modification
  source 1..16: mol_type = other RNA
ttgccgctgcccaatg

SEQ ID NO: 3475 - RNA, 16 nt, synthetic construct
  modified_base 1: mod_base = OTHER; note = thymine
  misc_feature 1..16: note = Antisense oligonucleotide
  modified_base 1: mod_base = OTHER; note = misc_feature - bicyclic nucleic acid scaffold modification
  modified_base 3: mod_base = OTHER; note = misc_feature - bicyclic nucleic acid scaffold modification
  modified_base 9: mod_base = OTHER; note = misc_feature - bicyclic nucleic acid scaffold modification
  modified_base 16: mod_base = OTHER; note = misc_feature - bicyclic nucleic acid scaffold modification
  source 1..16: mol_type = other RNA
ttgccgctgcccaatg

SEQ ID NO: 3476 - RNA, 16 nt, synthetic construct
  modified_base 1: mod_base = OTHER; note = thymine
  misc_feature 1..16: note = Antisense oligonucleotide
  modified_base 1: mod_base = OTHER; note = misc_feature - bicyclic nucleic acid scaffold modification
  modified_base 7: mod_base = OTHER; note = misc_feature - bicyclic nucleic acid scaffold modification
  modified_base 16: mod_base = OTHER; note = misc_feature - bicyclic nucleic acid scaffold modification
  source 1..16: mol_type = other RNA
ttgccgctgcccaatg

SEQ ID NO: 3477 - RNA, 16 nt, synthetic construct
  modified_base 1: mod_base = OTHER; note = thymine
  misc_feature 1..16: note = Antisense oligonucleotide
  modified_base 1: mod_base = OTHER; note = misc_feature - bicyclic nucleic acid scaffold modification
  modified_base 12: mod_base = OTHER; note = misc_feature - bicyclic nucleic acid scaffold modification
  modified_base 16: mod_base = OTHER; note = misc_feature - bicyclic nucleic acid scaffold modification
  source 1..16: mol_type = other RNA
ttgccgctgcccaatg

SEQ ID NO: 3478 - RNA, 16 nt, synthetic construct
  modified_base 1: mod_base = OTHER; note = thymine
  misc_feature 1..16: note = Antisense oligonucleotide
  modified_base 1: mod_base = OTHER; note = misc_feature - bicyclic nucleic acid scaffold modification
  modified_base 7: mod_base = OTHER; note = misc_feature - bicyclic nucleic acid scaffold modification
  modified_base 12: mod_base = OTHER; note = misc_feature - bicyclic nucleic acid scaffold modification
  modified_base 16: mod_base = OTHER; note = misc_feature - bicyclic nucleic acid scaffold modification
  source 1..16: mol_type = other RNA
ttgccgctgcccaatg

SEQ ID NO: 3479 - RNA, 16 nt, synthetic construct
  modified_base 1: mod_base = OTHER; note = thymine
  misc_feature 1..16: note = Antisense oligonucleotide
  modified_base 1: mod_base = OTHER; note = misc_feature - bicyclic nucleic acid scaffold modification
  modified_base 3: mod_base = OTHER; note = misc_feature - bicyclic nucleic acid scaffold modification
  modified_base 7: mod_base = OTHER; note = misc_feature - bicyclic nucleic acid scaffold modification
  modified_base 9: mod_base = OTHER; note = misc_feature - bicyclic nucleic acid scaffold modification
  modified_base 12: mod_base = OTHER; note = misc_feature - bicyclic nucleic acid scaffold modification
  modified_base 16: mod_base = OTHER; note = misc_feature - bicyclic nucleic acid scaffold modification
  source 1..16: mol_type = other RNA
ttgccgctgcccaatg

SEQ ID NO: 3480 - RNA, 16 nt, synthetic construct
  modified_base 1..2: mod_base = OTHER; note = thymine
  modified_base 15: mod_base = OTHER; note = thymine
  misc_feature 1..16: note = Antisense oligonucleotide
  modified_base 1..2: mod_base = OTHER; note = misc_feature - bicyclic nucleic acid scaffold modification
  modified_base 15..16: mod_base = OTHER; note = misc_feature - bicyclic nucleic acid scaffold modification
  source 1..16: mol_type = other RNA
ttgccgctgcccaatg

SEQ ID NO: 3481 - RNA, 16 nt, synthetic construct
  modified_base 1..2: mod_base = OTHER; note = thymine
  modified_base 15: mod_base = OTHER; note = thymine
  misc_feature 1..16: note = Antisense oligonucleotide
  modified_base 1..2: mod_base = OTHER; note = misc_feature - bicyclic nucleic acid scaffold modification
  modified_base 9: mod_base = OTHER; note = misc_feature - bicyclic nucleic acid scaffold modification
  modified_base 15..16: mod_base = OTHER; note = misc_feature - bicyclic nucleic acid scaffold modification
  source 1..16: mol_type = other RNA
ttgccgctgcccaatg

SEQ ID NO: 3482 - RNA, 16 nt, synthetic construct
  modified_base 1: mod_base = OTHER; note = thymine
  misc_feature 1..16: note = Antisense oligonucleotide
  modified_base 1: mod_base = OTHER; note = misc_feature - bicyclic nucleic acid scaffold modification
  modified_base 16: mod_base = OTHER; note = misc_feature - bicyclic nucleic acid scaffold modification
  source 1..16: mol_type = other RNA
tgccgctgcccaatgc

SEQ ID NO: 3483 - RNA, 16 nt, synthetic construct
  modified_base 1: mod_base = OTHER; note = thymine
  misc_feature 1..16: note = Antisense oligonucleotide
  modified_base 1..2: mod_base = OTHER; note = misc_feature - bicyclic nucleic acid scaffold modification
  modified_base 16: mod_base = OTHER; note = misc_feature - bicyclic nucleic acid scaffold modification
  source 1..16: mol_type = other RNA
tgccgctgcccaatgc

SEQ ID NO: 3484 - RNA, 16 nt, synthetic construct
  modified_base 1: mod_base = OTHER; note = thymine
  misc_feature 1..16: note = Antisense oligonucleotide
  modified_base 1: mod_base = OTHER; note = misc_feature - bicyclic nucleic acid scaffold modification
  modified_base 5: mod_base = OTHER; note = misc_feature - bicyclic nucleic acid scaffold modification
  modified_base 16: mod_base = OTHER; note = misc_feature - bicyclic nucleic acid scaffold modification
  source 1..16: mol_type = other RNA
tgccgctgcccaatgc

SEQ ID NO: 3485 - RNA, 16 nt, synthetic construct
  modified_base 1: mod_base = OTHER; note = thymine
  misc_feature 1..16: note = Antisense oligonucleotide
  modified_base 1: mod_base = OTHER; note = misc_feature - bicyclic nucleic acid scaffold modification
  modified_base 8: mod_base = OTHER; note = misc_feature - bicyclic nucleic acid scaffold modification
  modified_base 16: mod_base = OTHER; note = misc_feature - bicyclic nucleic acid scaffold modification
  source 1..16: mol_type = other RNA
tgccgctgcccaatgc

SEQ ID NO: 3486 - RNA, 16 nt, synthetic construct
  modified_base 1: mod_base = OTHER; note = thymine
  misc_feature 1..16: note = Antisense oligonucleotide
  modified_base 1: mod_base = OTHER; note = misc_feature - bicyclic nucleic acid scaffold modification
  modified_base 15..16: mod_base = OTHER; note = misc_feature - bicyclic nucleic acid scaffold modification
  source 1..16: mol_type = other RNA
tgccgctgcccaatgc

SEQ ID NO: 3487 - RNA, 16 nt, synthetic construct
  modified_base 1: mod_base = OTHER; note = thymine
  misc_feature 1..16: note = Antisense oligonucleotide
  modified_base 1: mod_base = OTHER; note = misc_feature - bicyclic nucleic acid scaffold modification
  modified_base 8: mod_base = OTHER; note = misc_feature - bicyclic nucleic acid scaffold modification
  modified_base 15..16: mod_base = OTHER; note = misc_feature - bicyclic nucleic acid scaffold modification
  source 1..16: mol_type = other RNA
tgccgctgcccaatgc

SEQ ID NO: 3488 - RNA, 16 nt, synthetic construct
  modified_base 1: mod_base = OTHER; note = thymine
  misc_feature 1..16: note = Antisense oligonucleotide
  modified_base 1..2: mod_base = OTHER; note = misc_feature - bicyclic nucleic acid scaffold modification
  modified_base 8: mod_base = OTHER; note = misc_feature - bicyclic nucleic acid scaffold modification
  modified_base 16: mod_base = OTHER; note = misc_feature - bicyclic nucleic acid scaffold modification
  source 1..16: mol_type = other RNA
tgccgctgcccaatgc

SEQ ID NO: 3489 - RNA, 16 nt, synthetic construct
  modified_base 1: mod_base = OTHER; note = thymine
  misc_feature 1..16: note = Antisense oligonucleotide
  modified_base 1: mod_base = OTHER; note = misc_feature - bicyclic nucleic acid scaffold modification
  modified_base 6: mod_base = OTHER; note = misc_feature - bicyclic nucleic acid scaffold modification
  modified_base 16: mod_base = OTHER; note = misc_feature - bicyclic nucleic acid scaffold modification
  source 1..16: mol_type = other RNA
tgccgctgcccaatgc

SEQ ID NO: 3490 - RNA, 16 nt, synthetic construct
  modified_base 1: mod_base = OTHER; note = thymine
  misc_feature 1..16: note = Antisense oligonucleotide
  modified_base 1: mod_base = OTHER; note = misc_feature - bicyclic nucleic acid scaffold modification
  modified_base 11: mod_base = OTHER; note = misc_feature - bicyclic nucleic acid scaffold modification
  modified_base 16: mod_base = OTHER; note = misc_feature - bicyclic nucleic acid scaffold modification
  source 1..16: mol_type = other RNA
tgccgctgcccaatgc

SEQ ID NO: 3491 - RNA, 16 nt, synthetic construct
  modified_base 1: mod_base = OTHER; note = thymine
  misc_feature 1..16: note = Antisense oligonucleotide
  modified_base 1: mod_base = OTHER; note = misc_feature - bicyclic nucleic acid scaffold modification
  modified_base 6: mod_base = OTHER; note = misc_feature - bicyclic nucleic acid scaffold modification
  modified_base 11: mod_base = OTHER; note = misc_feature - bicyclic nucleic acid scaffold modification
  modified_base 16: mod_base = OTHER; note = misc_feature - bicyclic nucleic acid scaffold modification
  source 1..16: mol_type = other RNA
tgccgctgcccaatgc

SEQ ID NO: 3492 - RNA, 16 nt, synthetic construct
  modified_base 1: mod_base = OTHER; note = thymine
  misc_feature 1..16: note = Antisense oligonucleotide
  modified_base 1..2: mod_base = OTHER; note = misc_feature - bicyclic nucleic acid scaffold modification
  modified_base 15..16: mod_base = OTHER; note = misc_feature - bicyclic nucleic acid scaffold modification
  source 1..16: mol_type = other RNA
tgccgctgcccaatgc

SEQ ID NO: 3493 - RNA, 16 nt, synthetic construct
  modified_base 1: mod_base = OTHER; note = thymine
  misc_feature 1..16: note = Antisense oligonucleotide
  modified_base 1..2: mod_base = OTHER; note = misc_feature - bicyclic nucleic acid scaffold modification
  modified_base 8: mod_base = OTHER; note = misc_feature - bicyclic nucleic acid scaffold modification
  modified_base 15..16: mod_base = OTHER; note = misc_feature - bicyclic nucleic acid scaffold modification
  source 1..16: mol_type = other RNA
tgccgctgcccaatgc

SEQ ID NO: 3494 - RNA, 16 nt, synthetic construct
  misc_feature 1..16: note = Antisense oligonucleotide
  modified_base 1: mod_base = OTHER; note = misc_feature - bicyclic nucleic acid scaffold modification
  modified_base 16: mod_base = OTHER; note = misc_feature - bicyclic nucleic acid scaffold modification
  source 1..16: mol_type = other RNA
gccgctgcccaatgcc

SEQ ID NO: 3495 - RNA, 16 nt, synthetic construct
  misc_feature 1..16: note = Antisense oligonucleotide
  modified_base 1: mod_base = OTHER; note = misc_feature - bicyclic nucleic acid scaffold modification
  modified_base 4: mod_base = OTHER; note = misc_feature - bicyclic nucleic acid scaffold modification
  modified_base 16: mod_base = OTHER; note = misc_feature - bicyclic nucleic acid scaffold modification
  source 1..16: mol_type = other RNA
gccgctgcccaatgcc

SEQ ID NO: 3496 - RNA, 16 nt, synthetic construct
  misc_feature 1..16: note = Antisense oligonucleotide
  modified_base 1: mod_base = OTHER; note = misc_feature - bicyclic nucleic acid scaffold modification
  modified_base 7: mod_base = OTHER; note = misc_feature - bicyclic nucleic acid scaffold modification
  modified_base 16: mod_base = OTHER; note = misc_feature - bicyclic nucleic acid scaffold modification
  source 1..16: mol_type = other RNA
gccgctgcccaatgcc

SEQ ID NO: 3497 - RNA, 16 nt, synthetic construct
  misc_feature 1..16: note = Antisense oligonucleotide
  modified_base 1: mod_base = OTHER; note = misc_feature - bicyclic nucleic acid scaffold modification
  modified_base 14: mod_base = OTHER; note = misc_feature - bicyclic nucleic acid scaffold modification
  modified_base 16: mod_base = OTHER; note = misc_feature - bicyclic nucleic acid scaffold modification
  source 1..16: mol_type = other RNA
gccgctgcccaatgcc

SEQ ID NO: 3498 - RNA, 16 nt, synthetic construct
  misc_feature 1..16: note = Antisense oligonucleotide
  modified_base 1: mod_base = OTHER; note = misc_feature - bicyclic nucleic acid scaffold modification
  modified_base 7: mod_base = OTHER; note = misc_feature - bicyclic nucleic acid scaffold modification
  modified_base 14: mod_base = OTHER; note = misc_feature - bicyclic nucleic acid scaffold modification
  modified_base 16: mod_base = OTHER; note = misc_feature - bicyclic nucleic acid scaffold modification
  source 1..16: mol_type = other RNA
gccgctgcccaatgcc

SEQ ID NO: 3499 - RNA, 16 nt, synthetic construct
  misc_feature 1..16: note = Antisense oligonucleotide
  modified_base 1: mod_base = OTHER; note = misc_feature - bicyclic nucleic acid scaffold modification
  modified_base 4: mod_base = OTHER; note = misc_feature - bicyclic nucleic acid scaffold modification
  modified_base 7: mod_base = OTHER; note = misc_feature - bicyclic nucleic acid scaffold modification
  modified_base 16: mod_base = OTHER; note = misc_feature - bicyclic nucleic acid scaffold modification
  source 1..16: mol_type = other RNA
gccgctgcccaatgcc

SEQ ID NO: 3500 - RNA, 16 nt, synthetic construct
  misc_feature 1..16: note = Antisense oligonucleotide
  modified_base 1: mod_base = OTHER; note = misc_feature - bicyclic nucleic acid scaffold modification
  modified_base 10: mod_base = OTHER; note = misc_feature - bicyclic nucleic acid scaffold modification
  modified_base 16: mod_base = OTHER; note = misc_feature - bicyclic nucleic acid scaffold modification
  source 1..16: mol_type = other RNA
gccgctgcccaatgcc

SEQ ID NO: 3501 - RNA, 16 nt, synthetic construct
  misc_feature 1..16: note = Antisense oligonucleotide
  modified_base 1: mod_base = OTHER; note = misc_feature - bicyclic nucleic acid scaffold modification
  modified_base 5: mod_base = OTHER; note = misc_feature - bicyclic nucleic acid scaffold modification
  modified_base 16: mod_base = OTHER; note = misc_feature - bicyclic nucleic acid scaffold modification
  source 1..16: mol_type = other RNA
gccgctgcccaatgcc

SEQ ID NO: 3502 - RNA, 16 nt, synthetic construct
  misc_feature 1..16: note = Antisense oligonucleotide
  modified_base 1: mod_base = OTHER; note = misc_feature - bicyclic nucleic acid scaffold modification
  modified_base 5: mod_base = OTHER; note = misc_feature - bicyclic nucleic acid scaffold modification
  modified_base 10: mod_base = OTHER; note = misc_feature - bicyclic nucleic acid scaffold modification
  modified_base 16: mod_base = OTHER; note = misc_feature - bicyclic nucleic acid scaffold modification
  source 1..16: mol_type = other RNA
gccgctgcccaatgcc

SEQ ID NO: 3503 - RNA, 16 nt, synthetic construct
  misc_feature 1..16: note = Antisense oligonucleotide
  modified_base 1..2: mod_base = OTHER; note = misc_feature - bicyclic nucleic acid scaffold modification
  modified_base 15..16: mod_base = OTHER; note = misc_feature - bicyclic nucleic acid scaffold modification
  source 1..16: mol_type = other RNA
gccgctgcccaatgcc

SEQ ID NO: 3504 - RNA, 16 nt, synthetic construct
  misc_feature 1..16: note = Antisense oligonucleotide
  modified_base 1..2: mod_base = OTHER; note = misc_feature - bicyclic nucleic acid scaffold modification
  modified_base 7: mod_base = OTHER; note = misc_feature - bicyclic nucleic acid scaffold modification
  modified_base 15..16: mod_base = OTHER; note = misc_feature - bicyclic nucleic acid scaffold modification
  source 1..16: mol_type = other RNA
gccgctgcccaatgcc

SEQ ID NO: 3505 - RNA, 16 nt, synthetic construct
  misc_feature 1..16: note = Antisense oligonucleotide
  modified_base 1: mod_base = OTHER; note = misc_feature - bicyclic nucleic acid scaffold modification
  modified_base 16: mod_base = OTHER; note = misc_feature - bicyclic nucleic acid scaffold modification
  source 1..16: mol_type = other RNA
ccgctgcccaatgcca

SEQ ID NO: 3506 - RNA, 16 nt, synthetic construct
  misc_feature 1..16: note = Antisense oligonucleotide
  modified_base 1: mod_base = OTHER; note = misc_feature - bicyclic nucleic acid scaffold modification
  modified_base 3: mod_base = OTHER; note = misc_feature - bicyclic nucleic acid scaffold modification
  modified_base 16: mod_base = OTHER; note = misc_feature - bicyclic nucleic acid scaffold modification
  source 1..16: mol_type = other RNA
ccgctgcccaatgcca

SEQ ID NO: 3507 - RNA, 16 nt, synthetic construct
  misc_feature 1..16: note = Antisense oligonucleotide
  modified_base 1: mod_base = OTHER; note = misc_feature - bicyclic nucleic acid scaffold modification
  modified_base 6: mod_base = OTHER; note = misc_feature - bicyclic nucleic acid scaffold modification
  modified_base 16: mod_base = OTHER; note = misc_feature - bicyclic nucleic acid scaffold modification
  source 1..16: mol_type = other RNA
ccgctgcccaatgcca

SEQ ID NO: 3508 - RNA, 16 nt, synthetic construct
  misc_feature 1..16: note = Antisense oligonucleotide
  modified_base 1: mod_base = OTHER; note = misc_feature - bicyclic nucleic acid scaffold modification
  modified_base 13: mod_base = OTHER; note = misc_feature - bicyclic nucleic acid scaffold modification
  modified_base 16: mod_base = OTHER; note = misc_feature - bicyclic nucleic acid scaffold modification
  source 1..16: mol_type = other RNA
ccgctgcccaatgcca

SEQ ID NO: 3509 - RNA, 16 nt, synthetic construct
  misc_feature 1..16: note = Antisense oligonucleotide
  modified_base 1: mod_base = OTHER; note = misc_feature - bicyclic nucleic acid scaffold modification
  modified_base 6: mod_base = OTHER; note = misc_feature - bicyclic nucleic acid scaffold modification
  modified_base 13: mod_base = OTHER; note = misc_feature - bicyclic nucleic acid scaffold modification
  modified_base 16: mod_base = OTHER; note = misc_feature - bicyclic nucleic acid scaffold modification
  source 1..16: mol_type = other RNA
ccgctgcccaatgcca

SEQ ID NO: 3510 - RNA, 16 nt, synthetic construct
  misc_feature 1..16: note = Antisense oligonucleotide
  modified_base 1: mod_base = OTHER; note = misc_feature - bicyclic nucleic acid scaffold modification
  modified_base 4: mod_base = OTHER; note = misc_feature - bicyclic nucleic acid scaffold modification
  modified_base 16: mod_base = OTHER; note = misc_feature - bicyclic nucleic acid scaffold modification
  source 1..16: mol_type = other RNA
ccgctgcccaatgcca

SEQ ID NO: 3511 - RNA, 16 nt, synthetic construct
  misc_feature 1..16: note = Antisense oligonucleotide
  modified_base 1: mod_base = OTHER; note = misc_feature - bicyclic nucleic acid scaffold modification
  modified_base 9: mod_base = OTHER; note = misc_feature - bicyclic nucleic acid scaffold modification
  modified_base 16: mod_base = OTHER; note = misc_feature - bicyclic nucleic acid scaffold modification
  source 1..16: mol_type = other RNA
ccgctgcccaatgcca

SEQ ID NO: 3512 - RNA, 16 nt, synthetic construct
  misc_feature 1..16: note = Antisense oligonucleotide
  modified_base 1: mod_base = OTHER; note = misc_feature - bicyclic nucleic acid scaffold modification
  modified_base 4: mod_base = OTHER; note = misc_feature - bicyclic nucleic acid scaffold modification
  modified_base 9: mod_base = OTHER; note = misc_feature - bicyclic nucleic acid scaffold modification
  modified_base 16: mod_base = OTHER; note = misc_feature - bicyclic nucleic acid scaffold modification
  source 1..16: mol_type = other RNA
ccgctgcccaatgcca

SEQ ID NO: 3513 - RNA, 16 nt, synthetic construct
  misc_feature 1..16: note = Antisense oligonucleotide
  modified_base 1: mod_base = OTHER; note = misc_feature - bicyclic nucleic acid scaffold modification
  modified_base 4: mod_base = OTHER; note = misc_feature - bicyclic nucleic acid scaffold modification
  modified_base 9: mod_base = OTHER; note = misc_feature - bicyclic nucleic acid scaffold modification
  modified_base 13: mod_base = OTHER; note = misc_feature - bicyclic nucleic acid scaffold modification
  modified_base 16: mod_base = OTHER; note = misc_feature - bicyclic nucleic acid scaffold modification
  source 1..16: mol_type = other RNA
ccgctgcccaatgcca

SEQ ID NO: 3514 - RNA, 16 nt, synthetic construct
  misc_feature 1..16: note = Antisense oligonucleotide
  modified_base 1..2: mod_base = OTHER; note = misc_feature - bicyclic nucleic acid scaffold modification
  modified_base 15..16: mod_base = OTHER; note = misc_feature - bicyclic nucleic acid scaffold modification
  source 1..16: mol_type = other RNA
ccgctgcccaatgcca

SEQ ID NO: 3515 - RNA, 16 nt, synthetic construct
  misc_feature 1..16: note = Antisense oligonucleotide
  modified_base 1..2: mod_base = OTHER; note = misc_feature - bicyclic nucleic acid scaffold modification
  modified_base 9: mod_base = OTHER; note = misc_feature - bicyclic nucleic acid scaffold modification
  modified_base 15..16: mod_base = OTHER; note = misc_feature - bicyclic nucleic acid scaffold modification
  source 1..16: mol_type = other RNA
ccgctgcccaatgcca

SEQ ID NO: 3516 - RNA, 16 nt, synthetic construct
  modified_base 16: mod_base = OTHER; note = thymine
  misc_feature 1..16: note = Antisense oligonucleotide
  modified_base 1: mod_base = OTHER; note = misc_feature - bicyclic nucleic acid scaffold modification
  modified_base 16: mod_base = OTHER; note = misc_feature - bicyclic nucleic acid scaffold modification
  source 1..16: mol_type = other RNA
cgctgcccaatgccat

SEQ ID NO: 3517 - RNA, 16 nt, synthetic construct
  modified_base 16: mod_base = OTHER; note = thymine
  misc_feature 1..16: note = Antisense oligonucleotide
  modified_base 1..2: mod_base = OTHER; note = misc_feature - bicyclic nucleic acid scaffold modification
  modified_base 16: mod_base = OTHER; note = misc_feature - bicyclic nucleic acid scaffold modification
  source 1..16: mol_type = other RNA
cgctgcccaatgccat

SEQ ID NO: 3518 - RNA, 16 nt, synthetic construct
  modified_base 16: mod_base = OTHER; note = thymine
  misc_feature 1..16: note = Antisense oligonucleotide
  modified_base 1: mod_base = OTHER; note = misc_feature - bicyclic nucleic acid scaffold modification
  modified_base 5: mod_base = OTHER; note = misc_feature - bicyclic nucleic acid scaffold modification
  modified_base 16: mod_base = OTHER; note = misc_feature - bicyclic nucleic acid scaffold modification
  source 1..16: mol_type = other RNA
cgctgcccaatgccat

SEQ ID NO: 3519 - RNA, 16 nt, synthetic construct
  modified_base 16: mod_base = OTHER; note = thymine
  misc_feature 1..16: note = Antisense oligonucleotide
  modified_base 1: mod_base = OTHER; note = misc_feature - bicyclic nucleic acid scaffold modification
  modified_base 12: mod_base = OTHER; note = misc_feature - bicyclic nucleic acid scaffold modification
  modified_base 16: mod_base = OTHER; note = misc_feature - bicyclic nucleic acid scaffold modification
  source 1..16: mol_type = other RNA
cgctgcccaatgccat

SEQ ID NO: 3520 - RNA, 16 nt, synthetic construct
  modified_base 16: mod_base = OTHER; note = thymine
  misc_feature 1..16: note = Antisense oligonucleotide
  modified_base 1: mod_base = OTHER; note = misc_feature - bicyclic nucleic acid scaffold modification
  modified_base 5: mod_base = OTHER; note = misc_feature - bicyclic nucleic acid scaffold modification
  modified_base 12: mod_base = OTHER; note = misc_feature - bicyclic nucleic acid scaffold modification
  modified_base 16: mod_base = OTHER; note = misc_feature - bicyclic nucleic acid scaffold modification
  source 1..16: mol_type = other RNA
cgctgcccaatgccat

SEQ ID NO: 3521 - RNA, 16 nt, synthetic construct
  modified_base 16: mod_base = OTHER; note = thymine
  misc_feature 1..16: note = Antisense oligonucleotide
  modified_base 1: mod_base = OTHER; note = misc_feature - bicyclic nucleic acid scaffold modification
  modified_base 3: mod_base = OTHER; note = misc_feature - bicyclic nucleic acid scaffold modification
  modified_base 16: mod_base = OTHER; note = misc_feature - bicyclic nucleic acid scaffold modification
  source 1..16: mol_type = other RNA
cgctgcccaatgccat

SEQ ID NO: 3522 - RNA, 16 nt, synthetic construct
  modified_base 16: mod_base = OTHER; note = thymine
  misc_feature 1..16: note = Antisense oligonucleotide
  modified_base 1: mod_base = OTHER; note = misc_feature - bicyclic nucleic acid scaffold modification
  modified_base 8: mod_base = OTHER; note = misc_feature - bicyclic nucleic acid scaffold modification
  modified_base 16: mod_base = OTHER; note = misc_feature - bicyclic nucleic acid scaffold modification
  source 1..16: mol_type = other RNA
cgctgcccaatgccat

SEQ ID NO: 3523 - RNA, 16 nt, synthetic construct
  modified_base 16: mod_base = OTHER; note = thymine
  misc_feature 1..16: note = Antisense oligonucleotide
  modified_base 1: mod_base = OTHER; note = misc_feature - bicyclic nucleic acid scaffold modification
  modified_base 14: mod_base = OTHER; note = misc_feature - bicyclic nucleic acid scaffold modification
  modified_base 16: mod_base = OTHER; note = misc_feature - bicyclic nucleic acid scaffold modification
  source 1..16: mol_type = other RNA
cgctgcccaatgccat

SEQ ID NO: 3524 - RNA, 16 nt, synthetic construct
  modified_base 16: mod_base = OTHER; note = thymine
  misc_feature 1..16: note = Antisense oligonucleotide
  modified_base 1: mod_base = OTHER; note = misc_feature - bicyclic nucleic acid scaffold modification
  modified_base 8: mod_base = OTHER; note = misc_feature - bicyclic nucleic acid scaffold modification
  modified_base 14: mod_base = OTHER; note = misc_feature - bicyclic nucleic acid scaffold modification
  modified_base 16: mod_base = OTHER; note = misc_feature - bicyclic nucleic acid scaffold modification
  source 1..16: mol_type = other RNA
cgctgcccaatgccat

SEQ ID NO: 3525 - RNA, 16 nt, synthetic construct
  modified_base 16: mod_base = OTHER; note = thymine
  misc_feature 1..16: note = Antisense oligonucleotide
  modified_base 1: mod_base = OTHER; note = misc_feature - bicyclic nucleic acid scaffold modification
  modified_base 3: mod_base = OTHER; note = misc_feature - bicyclic nucleic acid scaffold modification
  modified_base 8: mod_base = OTHER; note = misc_feature - bicyclic nucleic acid scaffold modification
  modified_base 16: mod_base = OTHER; note = misc_feature - bicyclic nucleic acid scaffold modification
  source 1..16: mol_type = other RNA
cgctgcccaatgccat

SEQ ID NO: 3526 - RNA, 16 nt, synthetic construct
  modified_base 16: mod_base = OTHER; note = thymine
  misc_feature 1..16: note = Antisense oligonucleotide
  modified_base 1..2: mod_base = OTHER; note = misc_feature - bicyclic nucleic acid scaffold modification
  modified_base 15..16: mod_base = OTHER; note = misc_feature - bicyclic nucleic acid scaffold modification
  source 1..16: mol_type = other RNA
cgctgcccaatgccat

SEQ ID NO: 3527 - RNA, 16 nt, synthetic construct
  modified_base 16: mod_base = OTHER; note = thymine
  misc_feature 1..16: note = Antisense oligonucleotide
  modified_base 1..2: mod_base = OTHER; note = misc_feature - bicyclic nucleic acid scaffold modification
  modified_base 8: mod_base = OTHER; note = misc_feature - bicyclic nucleic acid scaffold modification
  modified_base 15..16: mod_base = OTHER; note = misc_feature - bicyclic nucleic acid scaffold modification
  source 1..16: mol_type = other RNA
cgctgcccaatgccat

SEQ ID NO: 3528 - RNA, 16 nt, synthetic construct
  misc_feature 1..16: note = Antisense oligonucleotide
  modified_base 1: mod_base = OTHER; note = misc_feature - bicyclic nucleic acid scaffold modification
  modified_base 16: mod_base = OTHER; note = misc_feature - bicyclic nucleic acid scaffold modification
  source 1..16: mol_type = other RNA
gctgcccaatgccatc

SEQ ID NO: 3529 - RNA, 16 nt, synthetic construct
  misc_feature 1..16: note = Antisense oligonucleotide
  modified_base 1: mod_base = OTHER; note = misc_feature - bicyclic nucleic acid scaffold modification
  modified_base 4: mod_base = OTHER; note = misc_feature - bicyclic nucleic acid scaffold modification
  modified_base 16: mod_base = OTHER; note = misc_feature - bicyclic nucleic acid scaffold modification
  source 1..16: mol_type = other RNA
gctgcccaatgccatc

SEQ ID NO: 3530 - RNA, 16 nt, synthetic construct
  misc_feature 1..16: note = Antisense oligonucleotide
  modified_base 1: mod_base = OTHER; note = misc_feature - bicyclic nucleic acid scaffold modification
  modified_base 11: mod_base = OTHER; note = misc_feature - bicyclic nucleic acid scaffold modification
  modified_base 16: mod_base = OTHER; note = misc_feature - bicyclic nucleic acid scaffold modification
  source 1..16: mol_type = other RNA
gctgcccaatgccatc

SEQ ID NO: 3531 - RNA, 16 nt, synthetic construct
  misc_feature 1..16: note = Antisense oligonucleotide
  modified_base 1: mod_base = OTHER; note = misc_feature - bicyclic nucleic acid scaffold modification
  modified_base 4: mod_base = OTHER; note = misc_feature - bicyclic nucleic acid scaffold modification
  modified_base 11: mod_base = OTHER; note = misc_feature - bicyclic nucleic acid scaffold modification
  modified_base 16: mod_base = OTHER; note = misc_feature - bicyclic nucleic acid scaffold modification
  source 1..16: mol_type = other RNA
gctgcccaatgccatc

SEQ ID NO: 3532 - RNA, 16 nt, synthetic construct
  misc_feature 1..16: note = Antisense oligonucleotide
  modified_base 1..2: mod_base = OTHER; note = misc_feature - bicyclic nucleic acid scaffold modification
  modified_base 16: mod_base = OTHER; note = misc_feature - bicyclic nucleic acid scaffold modification
  source 1..16: mol_type = other RNA
gctgcccaatgccatc

SEQ ID NO: 3533 - RNA, 16 nt, synthetic construct
  misc_feature 1..16: note = Antisense oligonucleotide
  modified_base 1: mod_base = OTHER; note = misc_feature - bicyclic nucleic acid scaffold modification
  modified_base 7: mod_base = OTHER; note = misc_feature - bicyclic nucleic acid scaffold modification
  modified_base 16: mod_base = OTHER; note = misc_feature - bicyclic nucleic acid scaffold modification
  source 1..16: mol_type = other RNA
gctgcccaatgccatc

SEQ ID NO: 3534 - RNA, 16 nt, synthetic construct
  misc_feature 1..16: note = Antisense oligonucleotide
  modified_base 1: mod_base = OTHER; note = misc_feature - bicyclic nucleic acid scaffold modification
  modified_base 13: mod_base = OTHER; note = misc_feature - bicyclic nucleic acid scaffold modification
  modified_base 16: mod_base = OTHER; note = misc_feature - bicyclic nucleic acid scaffold modification
  source 1..16: mol_type = other RNA
gctgcccaatgccatc

SEQ ID NO: 3535 - RNA, 16 nt, synthetic construct
  misc_feature 1..16: note = Antisense oligonucleotide
  modified_base 1: mod_base = OTHER; note = misc_feature - bicyclic nucleic acid scaffold modification
  modified_base 7: mod_base = OTHER; note = misc_feature - bicyclic nucleic acid scaffold modification
  modified_base 13: mod_base = OTHER; note = misc_feature - bicyclic nucleic acid scaffold modification
  modified_base 16: mod_base = OTHER; note = misc_feature - bicyclic nucleic acid scaffold modification
  source 1..16: mol_type = other RNA
gctgcccaatgccatc

SEQ ID NO: 3536 - RNA, 16 nt, synthetic construct
  misc_feature 1..16: note = Antisense oligonucleotide
  modified_base 1..2: mod_base = OTHER; note = misc_feature - bicyclic nucleic acid scaffold modification
  modified_base 7: mod_base = OTHER; note = misc_feature - bicyclic nucleic acid scaffold modification
  modified_base 16: mod_base = OTHER; note = misc_feature - bicyclic nucleic acid scaffold modification
  source 1..16: mol_type = other RNA
gctgcccaatgccatc

SEQ ID NO: 3537 - RNA, 16 nt, synthetic construct
  modified_base 15: mod_base = OTHER; note = thymine
  misc_feature 1..16: note = Antisense oligonucleotide
  modified_base 1..2: mod_base = OTHER; note = misc_feature - bicyclic nucleic acid scaffold modification
  modified_base 15..16: mod_base = OTHER; note = misc_feature - bicyclic nucleic acid scaffold modification
  source 1..16: mol_type = other RNA
gctgcccaatgccatc

SEQ ID NO: 3538 - RNA, 16 nt, synthetic construct
  modified_base 15: mod_base = OTHER; note = thymine
  misc_feature 1..16: note = Antisense oligonucleotide
  modified_base 1..2: mod_base = OTHER; note = misc_feature - bicyclic nucleic acid scaffold modification
  modified_base 4: mod_base = OTHER; note = misc_feature - bicyclic nucleic acid scaffold modification
  modified_base 11: mod_base = OTHER; note = misc_feature - bicyclic nucleic acid scaffold modification
  modified_base 15..16: mod_base = OTHER; note = misc_feature - bicyclic nucleic acid scaffold modification
  source 1..16: mol_type = other RNA
gctgcccaatgccatc

SEQ ID NO: 3539 - RNA, 16 nt, synthetic construct
  misc_feature 1..16: note = Antisense oligonucleotide
  modified_base 1: mod_base = OTHER; note = misc_feature - bicyclic nucleic acid scaffold modification
  modified_base 16: mod_base = OTHER; note = misc_feature - bicyclic nucleic acid scaffold modification
  source 1..16: mol_type = other RNA
ctgcccaatgccatcc

SEQ ID NO: 3540 - RNA, 16 nt, synthetic construct
  misc_feature 1..16: note = Antisense oligonucleotide
  modified_base 1: mod_base = OTHER; note = misc_feature - bicyclic nucleic acid scaffold modification
  modified_base 3: mod_base = OTHER; note = misc_feature - bicyclic nucleic acid scaffold modification
  modified_base 16: mod_base = OTHER; note = misc_feature - bicyclic nucleic acid scaffold modification
  source 1..16: mol_type = other RNA
ctgcccaatgccatcc

SEQ ID NO: 3541 - RNA, 16 nt, synthetic construct
  misc_feature 1..16: note = Antisense oligonucleotide
  modified_base 1: mod_base = OTHER; note = misc_feature - bicyclic nucleic acid scaffold modification
  modified_base 10: mod_base = OTHER; note = misc_feature - bicyclic nucleic acid scaffold modification
  modified_base 16: mod_base = OTHER; note = misc_feature - bicyclic nucleic acid scaffold modification
  source 1..16: mol_type = other RNA
ctgcccaatgccatcc

SEQ ID NO: 3542 - RNA, 16 nt, synthetic construct
  misc_feature 1..16: note = Antisense oligonucleotide
  modified_base 1: mod_base = OTHER; note = misc_feature - bicyclic nucleic acid scaffold modification
  modified_base 3: mod_base = OTHER; note = misc_feature - bicyclic nucleic acid scaffold modification
  modified_base 10: mod_base = OTHER; note = misc_feature - bicyclic nucleic acid scaffold modification
  modified_base 16: mod_base = OTHER; note = misc_feature - bicyclic nucleic acid scaffold modification
  source 1..16: mol_type = other RNA
ctgcccaatgccatcc

SEQ ID NO: 3543 - RNA, 16 nt, synthetic construct
  misc_feature 1..16: note = Antisense oligonucleotide
  modified_base 1: mod_base = OTHER; note = misc_feature - bicyclic nucleic acid scaffold modification
  modified_base 6: mod_base = OTHER; note = misc_feature - bicyclic nucleic acid scaffold modification
  modified_base 16: mod_base = OTHER; note = misc_feature - bicyclic nucleic acid scaffold modification
  source 1..16: mol_type = other RNA
ctgcccaatgccatcc

SEQ ID NO: 3544 - RNA, 16 nt, synthetic construct
  misc_feature 1..16: note = Antisense oligonucleotide
  modified_base 1: mod_base = OTHER; note = misc_feature - bicyclic nucleic acid scaffold modification
  modified_base 12: mod_base = OTHER; note = misc_feature - bicyclic nucleic acid scaffold modification
  modified_base 16: mod_base = OTHER; note = misc_feature - bicyclic nucleic acid scaffold modification
  source 1..16: mol_type = other RNA
ctgcccaatgccatcc

SEQ ID NO: 3545 - RNA, 16 nt, synthetic construct
  misc_feature 1..16: note = Antisense oligonucleotide
  modified_base 1: mod_base = OTHER; note = misc_feature - bicyclic nucleic acid scaffold modification
  modified_base 6: mod_base = OTHER; note = misc_feature - bicyclic nucleic acid scaffold modification
  modified_base 12: mod_base = OTHER; note = misc_feature - bicyclic nucleic acid scaffold modification
  modified_base 16: mod_base = OTHER; note = misc_feature - bicyclic nucleic acid scaffold modification
  source 1..16: mol_type = other RNA
ctgcccaatgccatcc

SEQ ID NO: 3546 - RNA, 16 nt, synthetic construct
  misc_feature 1..16: note = Antisense oligonucleotide
  modified_base 1: mod_base = OTHER; note = misc_feature - bicyclic nucleic acid scaffold modification
  modified_base 6: mod_base = OTHER; note = misc_feature - bicyclic nucleic acid scaffold modification
  modified_base 15..16: mod_base = OTHER; note = misc_feature - bicyclic nucleic acid scaffold modification
  source 1..16: mol_type = other RNA
ctgcccaatgccatcc

SEQ ID NO: 3547 - RNA, 16 nt, synthetic construct
  modified_base 2: mod_base = OTHER; note = thymine
  misc_feature 1..16: note = Antisense oligonucleotide
  modified_base 1..2: mod_base = OTHER; note = misc_feature - bicyclic nucleic acid scaffold modification
  modified_base 15..16: mod_base = OTHER; note = misc_feature - bicyclic nucleic acid scaffold modification
  source 1..16: mol_type = other RNA
ctgcccaatgccatcc

SEQ ID NO: 3548 - RNA, 16 nt, synthetic construct
  modified_base 2: mod_base = OTHER; note = thymine
  misc_feature 1..16: note = Antisense oligonucleotide
  modified_base 1..2: mod_base = OTHER; note = misc_feature - bicyclic nucleic acid scaffold modification
  modified_base 10: mod_base = OTHER; note = misc_feature - bicyclic nucleic acid scaffold modification
  modified_base 15..16: mod_base = OTHER; note = misc_feature - bicyclic nucleic acid scaffold modification
  source 1..16: mol_type = other RNA
ctgcccaatgccatcc

SEQ ID NO: 3549 - RNA, 16 nt, synthetic construct
  modified_base 2: mod_base = OTHER; note = thymine
  misc_feature 1..16: note = Antisense oligonucleotide
  modified_base 1..2: mod_base = OTHER; note = misc_feature - bicyclic nucleic acid scaffold modification
  modified_base 6: mod_base = OTHER; note = misc_feature - bicyclic nucleic acid scaffold modification
  modified_base 15..16: mod_base = OTHER; note = misc_feature - bicyclic nucleic acid scaffold modification
  source 1..16: mol_type = other RNA
ctgcccaatgccatcc

SEQ ID NO: 3550 - RNA, 16 nt, synthetic construct
  modified_base 1: mod_base = OTHER; note = thymine
  modified_base 16: mod_base = OTHER; note = thymine
  misc_feature 1..16: note = Antisense oligonucleotide
  modified_base 1: mod_base = OTHER; note = misc_feature - bicyclic nucleic acid scaffold modification
  modified_base 16: mod_base = OTHER; note = misc_feature - bicyclic nucleic acid scaffold modification
  source 1..16: mol_type = other RNA
tgcccaatgccatcct

SEQ ID NO: 3551 - RNA, 16 nt, synthetic construct
  modified_base 1: mod_base = OTHER; note = thymine
  modified_base 16: mod_base = OTHER; note = thymine
  misc_feature 1..16: note = Antisense oligonucleotide
  modified_base 1: mod_base = OTHER; note = misc_feature - bicyclic nucleic acid scaffold modification
  modified_base 5: mod_base = OTHER; note = misc_feature - bicyclic nucleic acid scaffold modification
  modified_base 16: mod_base = OTHER; note = misc_feature - bicyclic nucleic acid scaffold modification
  source 1..16: mol_type = other RNA
tgcccaatgccatcct

SEQ ID NO: 3552 - RNA, 16 nt, synthetic construct
  modified_base 1: mod_base = OTHER; note = thymine
  modified_base 16: mod_base = OTHER; note = thymine
  misc_feature 1..16: note = Antisense oligonucleotide
  modified_base 1: mod_base = OTHER; note = misc_feature - bicyclic nucleic acid scaffold modification
  modified_base 11: mod_base = OTHER; note = misc_feature - bicyclic nucleic acid scaffold modification
  modified_base 16: mod_base = OTHER; note = misc_feature - bicyclic nucleic acid scaffold modification
  source 1..16: mol_type = other RNA
tgcccaatgccatcct

SEQ ID NO: 3553 - RNA, 16 nt, synthetic construct
  modified_base 1: mod_base = OTHER; note = thymine
  modified_base 16: mod_base = OTHER; note = thymine
  misc_feature 1..16: note = Antisense oligonucleotide
  modified_base 1: mod_base = OTHER; note = misc_feature - bicyclic nucleic acid scaffold modification
  modified_base 14: mod_base = OTHER; note = misc_feature - bicyclic nucleic acid scaffold modification
  modified_base 16: mod_base = OTHER; note = misc_feature - bicyclic nucleic acid scaffold modification
  source 1..16: mol_type = other RNA
tgcccaatgccatcct

SEQ ID NO: 3554 - RNA, 16 nt, synthetic construct
  modified_base 1: mod_base = OTHER; note = thymine
  modified_base 16: mod_base = OTHER; note = thymine
  misc_feature 1..16: note = Antisense oligonucleotide
  modified_base 1: mod_base = OTHER; note = misc_feature - bicyclic nucleic acid scaffold modification
  modified_base 5: mod_base = OTHER; note = misc_feature - bicyclic nucleic acid scaffold modification
  modified_base 11: mod_base = OTHER; note = misc_feature - bicyclic nucleic acid scaffold modification
  modified_base 16: mod_base = OTHER; note = misc_feature - bicyclic nucleic acid scaffold modification
  source 1..16: mol_type = other RNA
tgcccaatgccatcct

SEQ ID NO: 3555 - RNA, 16 nt, synthetic construct
  modified_base 1: mod_base = OTHER; note = thymine
  modified_base 16: mod_base = OTHER; note = thymine
  misc_feature 1..16: note = Antisense oligonucleotide
  modified_base 1..2: mod_base = OTHER; note = misc_feature - bicyclic nucleic acid scaffold modification
  modified_base 16: mod_base = OTHER; note = misc_feature - bicyclic nucleic acid scaffold modification
  source 1..16: mol_type = other RNA
tgcccaatgccatcct

SEQ ID NO: 3556 - RNA, 16 nt, synthetic construct
  modified_base 1: mod_base = OTHER; note = thymine
  modified_base 16: mod_base = OTHER; note = thymine
  misc_feature 1..16: note = Antisense oligonucleotide
  modified_base 1: mod_base = OTHER; note = misc_feature - bicyclic nucleic acid scaffold modification
  modified_base 9: mod_base = OTHER; note = misc_feature - bicyclic nucleic acid scaffold modification
  modified_base 16: mod_base = OTHER; note = misc_feature - bicyclic nucleic acid scaffold modification
  source 1..16: mol_type = other RNA
tgcccaatgccatcct

SEQ ID NO: 3557 - RNA, 16 nt, synthetic construct
  modified_base 1: mod_base = OTHER; note = thymine
  modified_base 16: mod_base = OTHER; note = thymine
  misc_feature 1..16: note = Antisense oligonucleotide
  modified_base 1..2: mod_base = OTHER; note = misc_feature - bicyclic nucleic acid scaffold modification
  modified_base 9: mod_base = OTHER; note = misc_feature - bicyclic nucleic acid scaffold modification
  modified_base 16: mod_base = OTHER; note = misc_feature - bicyclic nucleic acid scaffold modification
  source 1..16: mol_type = other RNA
tgcccaatgccatcct

SEQ ID NO: 3558 - RNA, 16 nt, synthetic construct
  modified_base 1: mod_base = OTHER; note = thymine
  modified_base 16: mod_base = OTHER; note = thymine
  misc_feature 1..16: note = Antisense oligonucleotide
  modified_base 1: mod_base = OTHER; note = misc_feature - bicyclic nucleic acid scaffold modification
  modified_base 5: mod_base = OTHER; note = misc_feature - bicyclic nucleic acid scaffold modification
  modified_base 11: mod_base = OTHER; note = misc_feature - bicyclic nucleic acid scaffold modification
  modified_base 14: mod_base = OTHER; note = misc_feature - bicyclic nucleic acid scaffold modification
  modified_base 16: mod_base = OTHER; note = misc_feature - bicyclic nucleic acid scaffold modification
  source 1..16: mol_type = other RNA
tgcccaatgccatcct

SEQ ID NO: 3559 - RNA, 16 nt, synthetic construct
  modified_base 1: mod_base = OTHER; note = thymine
  modified_base 16: mod_base = OTHER; note = thymine
  misc_feature 1..16: note = Antisense oligonucleotide
  modified_base 1..2: mod_base = OTHER; note = misc_feature - bicyclic nucleic acid scaffold modification
  modified_base 15..16: mod_base = OTHER; note = misc_feature - bicyclic nucleic acid scaffold modification
  source 1..16: mol_type = other RNA
tgcccaatgccatcct

SEQ ID NO: 3560 - RNA, 16 nt, synthetic construct
  modified_base 1: mod_base = OTHER; note = thymine
  modified_base 16: mod_base = OTHER; note = thymine
  misc_feature 1..16: note = Antisense oligonucleotide
  modified_base 1..2: mod_base = OTHER; note = misc_feature - bicyclic nucleic acid scaffold modification
  modified_base 9: mod_base = OTHER; note = misc_feature - bicyclic nucleic acid scaffold modification
  modified_base 15..16: mod_base = OTHER; note = misc_feature - bicyclic nucleic acid scaffold modification
  source 1..16: mol_type = other RNA
tgcccaatgccatcct

SEQ ID NO: 3561 - RNA, 16 nt, synthetic construct
  misc_feature 1..16: note = Antisense oligonucleotide
  modified_base 1: mod_base = OTHER; note = misc_feature - bicyclic nucleic acid scaffold modification
  modified_base 16: mod_base = OTHER; note = misc_feature - bicyclic nucleic acid scaffold modification
  source 1..16: mol_type = other RNA
gcccaatgccatcctg

SEQ ID NO: 3562 - RNA, 16 nt, synthetic construct
  misc_feature 1..16: note = Antisense oligonucleotide
  modified_base 1: mod_base = OTHER; note = misc_feature - bicyclic nucleic acid scaffold modification
  modified_base 8: mod_base = OTHER; note = misc_feature - bicyclic nucleic acid scaffold modification
  modified_base 16: mod_base = OTHER; note = misc_feature - bicyclic nucleic acid scaffold modification
  source 1..16: mol_type = other RNA
gcccaatgccatcctg

SEQ ID NO: 3563 - RNA, 16 nt, synthetic construct
  misc_feature 1..16: note = Antisense oligonucleotide
  modified_base 1: mod_base = OTHER; note = misc_feature - bicyclic nucleic acid scaffold modification
  modified_base 14: mod_base = OTHER; note = misc_feature - bicyclic nucleic acid scaffold modification
  modified_base 16: mod_base = OTHER; note = misc_feature - bicyclic nucleic acid scaffold modification
  source 1..16: mol_type = other RNA
gcccaatgccatcctg

SEQ ID NO: 3564 - RNA, 16 nt, synthetic construct
  misc_feature 1..16: note = Antisense oligonucleotide
  modified_base 1: mod_base = OTHER; note = misc_feature - bicyclic nucleic acid scaffold modification
  modified_base 10: mod_base = OTHER; note = misc_feature - bicyclic nucleic acid scaffold modification
  modified_base 16: mod_base = OTHER; note = misc_feature - bicyclic nucleic acid scaffold modification
  source 1..16: mol_type = other RNA
gcccaatgccatcctg

SEQ ID NO: 3565 - RNA, 16 nt, synthetic construct
  misc_feature 1..16: note = Antisense oligonucleotide
  modified_base 1: mod_base = OTHER; note = misc_feature - bicyclic nucleic acid scaffold modification
  modified_base 4: mod_base = OTHER; note = misc_feature - bicyclic nucleic acid scaffold modification
  modified_base 16: mod_base = OTHER; note = misc_feature - bicyclic nucleic acid scaffold modification
  source 1..16: mol_type = other RNA
gcccaatgccatcctg

SEQ ID NO: 3566 - RNA, 16 nt, synthetic construct
  misc_feature 1..16: note = Antisense oligonucleotide
  modified_base 1: mod_base = OTHER; note = misc_feature - bicyclic nucleic acid scaffold modification
  modified_base 4: mod_base = OTHER; note = misc_feature - bicyclic nucleic acid scaffold modification
  modified_base 13: mod_base = OTHER; note = misc_feature - bicyclic nucleic acid scaffold modification
  modified_base 16: mod_base = OTHER; note = misc_feature - bicyclic nucleic acid scaffold modification
  source 1..16: mol_type = other RNA
gcccaatgccatcctg

SEQ ID NO: 3567 - RNA, 16 nt, synthetic construct
  misc_feature 1..16: note = Antisense oligonucleotide
  modified_base 1: mod_base = OTHER; note = misc_feature - bicyclic nucleic acid scaffold modification
  modified_base 8: mod_base = OTHER; note = misc_feature - bicyclic nucleic acid scaffold modification
  modified_base 13: mod_base = OTHER; note = misc_feature - bicyclic nucleic acid scaffold modification
  modified_base 16: mod_base = OTHER; note = misc_feature - bicyclic nucleic acid scaffold modification
  source 1..16: mol_type = other RNA
gcccaatgccatcctg

SEQ ID NO: 3568 - RNA, 16 nt, synthetic construct
  misc_feature 1..16: note = Antisense oligonucleotide
  modified_base 1: mod_base = OTHER; note = misc_feature - bicyclic nucleic acid scaffold modification
  modified_base 4: mod_base = OTHER; note = misc_feature - bicyclic nucleic acid scaffold modification
  modified_base 8: mod_base = OTHER; note = misc_feature - bicyclic nucleic acid scaffold modification
  modified_base 16: mod_base = OTHER; note = misc_feature - bicyclic nucleic acid scaffold modification
  source 1..16: mol_type = other RNA
gcccaatgccatcctg

SEQ ID NO: 3569 - RNA, 16 nt, synthetic construct
  misc_feature 1..16: note = Antisense oligonucleotide
  modified_base 1: mod_base = OTHER; note = misc_feature - bicyclic nucleic acid scaffold modification
  modified_base 4: mod_base = OTHER; note = misc_feature - bicyclic nucleic acid scaffold modification
  modified_base 10: mod_base = OTHER; note = misc_feature - bicyclic nucleic acid scaffold modification
  modified_base 16: mod_base = OTHER; note = misc_feature - bicyclic nucleic acid scaffold modification
  source 1..16: mol_type = other RNA
gcccaatgccatcctg

SEQ ID NO: 3570 - RNA, 16 nt, synthetic construct
  modified_base 15: mod_base = OTHER; note = thymine
  misc_feature 1..16: note = Antisense oligonucleotide
  modified_base 1..2: mod_base = OTHER; note = misc_feature - bicyclic nucleic acid scaffold modification
  modified_base 15..16: mod_base = OTHER; note = misc_feature - bicyclic nucleic acid scaffold modification
  source 1..16: mol_type = other RNA
gcccaatgccatcctg

SEQ ID NO: 3571 - RNA, 16 nt, synthetic construct
  modified_base 15: mod_base = OTHER; note = thymine
  misc_feature 1..16: note = Antisense oligonucleotide
  modified_base 1..2: mod_base = OTHER; note = misc_feature - bicyclic nucleic acid scaffold modification
  modified_base 8: mod_base = OTHER; note = misc_feature - bicyclic nucleic acid scaffold modification
  modified_base 15..16: mod_base = OTHER; note = misc_feature - bicyclic nucleic acid scaffold modification
  source 1..16: mol_type = other RNA
gcccaatgccatcctg

SEQ ID NO: 3572 - RNA, 16 nt, synthetic construct
  modified_base 15: mod_base = OTHER; note = thymine
  misc_feature 1..16: note = Antisense oligonucleotide
  modified_base 1: mod_base = OTHER; note = misc_feature - bicyclic nucleic acid scaffold modification
  modified_base 10: mod_base = OTHER; note = misc_feature - bicyclic nucleic acid scaffold modification
  modified_base 15..16: mod_base = OTHER; note = misc_feature - bicyclic nucleic acid scaffold modification
  source 1..16: mol_type = other RNA
gcccaatgccatcctg

SEQ ID NO: 3573 - RNA, 24 nt, synthetic construct
  misc_feature 1..24: note = Antisense oligonucleotide
  modified_base 1: mod_base = OTHER; note = misc_feature - bicyclic nucleic acid scaffold modification
  modified_base 24: mod_base = OTHER; note = misc_feature - bicyclic nucleic acid scaffold modification
  source 1..24: mol_type = other RNA
caggcttcccaatttttcctgtag

SEQ ID NO: 3574 - RNA, 24 nt, synthetic construct
  misc_feature 1..24: note = Antisense oligonucleotide
  modified_base 1: mod_base = OTHER; note = misc_feature - bicyclic nucleic acid scaffold modification
  modified_base 3: mod_base = OTHER; note = misc_feature - bicyclic nucleic acid scaffold modification
  modified_base 24: mod_base = OTHER; note = misc_feature - bicyclic nucleic acid scaffold modification
  source 1..24: mol_type = other RNA
caggcttcccaatttttcctgtag

SEQ ID NO: 3575 - RNA, 24 nt, synthetic construct
  misc_feature 1..24: note = Antisense oligonucleotide
  modified_base 1: mod_base = OTHER; note = misc_feature - bicyclic nucleic acid scaffold modification
  modified_base 4: mod_base = OTHER; note = misc_feature - bicyclic nucleic acid scaffold modification
  modified_base 24: mod_base = OTHER; note = misc_feature - bicyclic nucleic acid scaffold modification
  source 1..24: mol_type = other RNA
caggcttcccaatttttcctgtag

SEQ ID NO: 3576 - RNA, 24 nt, synthetic construct
  misc_feature 1..24: note = Antisense oligonucleotide
  modified_base 1: mod_base = OTHER; note = misc_feature - bicyclic nucleic acid scaffold modification
  modified_base 21: mod_base = OTHER; note = misc_feature - bicyclic nucleic acid scaffold modification
  modified_base 24: mod_base = OTHER; note = misc_feature - bicyclic nucleic acid scaffold modification
  source 1..24: mol_type = other RNA
caggcttcccaatttttcctgtag

SEQ ID NO: 3577 - RNA, 24 nt, synthetic construct
  misc_feature 1..24: note = Antisense oligonucleotide
  modified_base 1: mod_base = OTHER; note = misc_feature - bicyclic nucleic acid scaffold modification
  modified_base 3: mod_base = OTHER; note = misc_feature - bicyclic nucleic acid scaffold modification
  modified_base 21: mod_base = OTHER; note = misc_feature - bicyclic nucleic acid scaffold modification
  modified_base 24: mod_base = OTHER; note = misc_feature - bicyclic nucleic acid scaffold modification
  source 1..24: mol_type = other RNA
caggcttcccaatttttcctgtag

SEQ ID NO: 3578 - RNA, 24 nt, synthetic construct
  misc_feature 1..24: note = Antisense oligonucleotide
  modified_base 1: mod_base = OTHER; note = misc_feature - bicyclic nucleic acid scaffold modification
  modified_base 4: mod_base = OTHER; note = misc_feature - bicyclic nucleic acid scaffold modification
  modified_base 21: mod_base = OTHER; note = misc_feature - bicyclic nucleic acid scaffold modification
  modified_base 24: mod_base = OTHER; note = misc_feature - bicyclic nucleic acid scaffold modification
  source 1..24: mol_type = other RNA
caggcttcccaatttttcctgtag

SEQ ID NO: 3579 - RNA, 24 nt, synthetic construct
  misc_feature 1..24: note = Antisense oligonucleotide
  modified_base 1: mod_base = OTHER; note = misc_feature - bicyclic nucleic acid scaffold modification
  modified_base 5: mod_base = OTHER; note = misc_feature - bicyclic nucleic acid scaffold modification
  modified_base 24: mod_base = OTHER; note = misc_feature - bicyclic nucleic acid scaffold modification
  source 1..24: mol_type = other RNA
caggcttcccaatttttcctgtag

SEQ ID NO: 3580 - RNA, 24 nt, synthetic construct
  misc_feature 1..24: note = Antisense oligonucleotide
  modified_base 1: mod_base = OTHER; note = misc_feature - bicyclic nucleic acid scaffold modification
  modified_base 8: mod_base = OTHER; note = misc_feature - bicyclic nucleic acid scaffold modification
  modified_base 24: mod_base = OTHER; note = misc_feature - bicyclic nucleic acid scaffold modification
  source 1..24: mol_type = other RNA
caggcttcccaatttttcctgtag

SEQ ID NO: 3581 - RNA, 24 nt, synthetic construct
  misc_feature 1..24: note = Antisense oligonucleotide
  modified_base 1: mod_base = OTHER; note = misc_feature - bicyclic nucleic acid scaffold modification
  modified_base 10: mod_base = OTHER; note = misc_feature - bicyclic nucleic acid scaffold modification
  modified_base 24: mod_base = OTHER; note = misc_feature - bicyclic nucleic acid scaffold modification
  source 1..24: mol_type = other RNA
caggcttcccaatttttcctgtag

SEQ ID NO: 3582 - RNA, 24 nt, synthetic construct
  misc_feature 1..24: note = Antisense oligonucleotide
  modified_base 1: mod_base = OTHER; note = misc_feature - bicyclic nucleic acid scaffold modification
  modified_base 18: mod_base = OTHER; note = misc_feature - bicyclic nucleic acid scaffold modification
  modified_base 24: mod_base = OTHER; note = misc_feature - bicyclic nucleic acid scaffold modification
  source 1..24: mol_type = other RNA
caggcttcccaatttttcctgtag

SEQ ID NO: 3583 - RNA, 24 nt, synthetic construct
  misc_feature 1..24: note = Antisense oligonucleotide
  modified_base 1: mod_base = OTHER; note = misc_feature - bicyclic nucleic acid scaffold modification
  modified_base 19: mod_base = OTHER; note = misc_feature - bicyclic nucleic acid scaffold modification
  modified_base 24: mod_base = OTHER; note = misc_feature - bicyclic nucleic acid scaffold modification
  source 1..24: mol_type = other RNA
caggcttcccaatttttcctgtag

SEQ ID NO: 3584 - RNA, 24 nt, synthetic construct
  misc_feature 1..24: note = Antisense oligonucleotide
  modified_base 1: mod_base = OTHER; note = misc_feature - bicyclic nucleic acid scaffold modification
  modified_base 5: mod_base = OTHER; note = misc_feature - bicyclic nucleic acid scaffold modification
  modified_base 19: mod_base = OTHER; note = misc_feature - bicyclic nucleic acid scaffold modification
  modified_base 24: mod_base = OTHER; note = misc_feature - bicyclic nucleic acid scaffold modification
  source 1..24: mol_type = other RNA
caggcttcccaatttttcctgtag

SEQ ID NO: 3585 - RNA, 24 nt, synthetic construct
  misc_feature 1..24: note = Antisense oligonucleotide
  modified_base 1: mod_base = OTHER; note = misc_feature - bicyclic nucleic acid scaffold modification
  modified_base 8: mod_base = OTHER; note = misc_feature - bicyclic nucleic acid scaffold modification
  modified_base 18: mod_base = OTHER; note = misc_feature - bicyclic nucleic acid scaffold modification
  modified_base 24: mod_base = OTHER; note = misc_feature - bicyclic nucleic acid scaffold modification
  source 1..24: mol_type = other RNA
caggcttcccaatttttcctgtag

SEQ ID NO: 3586 - RNA, 24 nt, synthetic construct
  misc_feature 1..24: note = Antisense oligonucleotide
  modified_base 1: mod_base = OTHER; note = misc_feature - bicyclic nucleic acid scaffold modification
  modified_base 5: mod_base = OTHER; note = misc_feature - bicyclic nucleic acid scaffold modification
  modified_base 10: mod_base = OTHER; note = misc_feature - bicyclic nucleic acid scaffold modification
  modified_base 19: mod_base = OTHER; note = misc_feature - bicyclic nucleic acid scaffold modification
  modified_base 24: mod_base = OTHER; note = misc_feature - bicyclic nucleic acid scaffold modification
  source 1..24: mol_type = other RNA
caggcttcccaatttttcctgtag

SEQ ID NO: 3587 - RNA, 24 nt, synthetic construct
  misc_feature 1..24: note = Antisense oligonucleotide
  modified_base 1..2: mod_base = OTHER; note = misc_feature - bicyclic nucleic acid scaffold modification
  modified_base 23..24: mod_base = OTHER; note = misc_feature - bicyclic nucleic acid scaffold modification
  source 1..24: mol_type = other RNA
caggcttcccaatttttcctgtag

SEQ ID NO: 3588 - RNA, 24 nt, synthetic construct
  misc_feature 1..24: note = Antisense oligonucleotide
  modified_base 1..2: mod_base = OTHER; note = misc_feature - bicyclic nucleic acid scaffold modification
  modified_base 10: mod_base = OTHER; note = misc_feature - bicyclic nucleic acid scaffold modification
  modified_base 18: mod_base = OTHER; note = misc_feature - bicyclic nucleic acid scaffold modification
  modified_base 23..24: mod_base = OTHER; note = misc_feature - bicyclic nucleic acid scaffold modification
  source 1..24: mol_type = other RNA
caggcttcccaatttttcctgtag

SEQ ID NO: 3589 - RNA, 22 nt, synthetic construct
  modified_base 22: mod_base = OTHER; note = thymine
  misc_feature 1..22: note = Antisense oligonucleotide
  modified_base 1: mod_base = OTHER; note = misc_feature - bicyclic nucleic acid scaffold modification
  modified_base 22: mod_base = OTHER; note = misc_feature - bicyclic nucleic acid scaffold modification
  source 1..22: mol_type = other RNA
caggcttcccaatttttcctgt

SEQ ID NO: 3590 - RNA, 22 nt, synthetic construct
  modified_base 22: mod_base = OTHER; note = thymine
  misc_feature 1..22: note = Antisense oligonucleotide
  modified_base 1: mod_base = OTHER; note = misc_feature - bicyclic nucleic acid scaffold modification
  modified_base 3: mod_base = OTHER; note = misc_feature - bicyclic nucleic acid scaffold modification
  modified_base 22: mod_base = OTHER; note = misc_feature - bicyclic nucleic acid scaffold modification
  source 1..22: mol_type = other RNA
caggcttcccaatttttcctgt

SEQ ID NO: 3591 - RNA, 22 nt, synthetic construct
  modified_base 22: mod_base = OTHER; note = thymine
  misc_feature 1..22: note = Antisense oligonucleotide
  modified_base 1: mod_base = OTHER; note = misc_feature - bicyclic nucleic acid scaffold modification
  modified_base 4: mod_base = OTHER; note = misc_feature - bicyclic nucleic acid scaffold modification
  modified_base 22: mod_base = OTHER; note = misc_feature - bicyclic nucleic acid scaffold modification
  source 1..22: mol_type = other RNA
caggcttcccaatttttcctgt

SEQ ID NO: 3592 - RNA, 22 nt, synthetic construct
  modified_base 22: mod_base = OTHER; note = thymine
  misc_feature 1..22: note = Antisense oligonucleotide
  modified_base 1: mod_base = OTHER; note = misc_feature - bicyclic nucleic acid scaffold modification
  modified_base 21..22: mod_base = OTHER; note = misc_feature - bicyclic nucleic acid scaffold modification
  source 1..22: mol_type = other RNA
caggcttcccaatttttcctgt

SEQ ID NO: 3593 - RNA, 22 nt, synthetic construct
  modified_base 22: mod_base = OTHER; note = thymine
  misc_feature 1..22: note = Antisense oligonucleotide
  modified_base 1: mod_base = OTHER; note = misc_feature - bicyclic nucleic acid scaffold modification
  modified_base 3: mod_base = OTHER; note = misc_feature - bicyclic nucleic acid scaffold modification
  modified_base 21..22: mod_base = OTHER; note = misc_feature - bicyclic nucleic acid scaffold modification
  source 1..22: mol_type = other RNA
caggcttcccaatttttcctgt

SEQ ID NO: 3594 - RNA, 22 nt, synthetic construct
  modified_base 22: mod_base = OTHER; note = thymine
  misc_feature 1..22: note = Antisense oligonucleotide
  modified_base 1: mod_base = OTHER; note = misc_feature - bicyclic nucleic acid scaffold modification
  modified_base 5: mod_base = OTHER; note = misc_feature - bicyclic nucleic acid scaffold modification
  modified_base 22: mod_base = OTHER; note = misc_feature - bicyclic nucleic acid scaffold modification
  source 1..22: mol_type = other RNA
caggcttcccaatttttcctgt

SEQ ID NO: 3595 - RNA, 22 nt, synthetic construct
  modified_base 22: mod_base = OTHER; note = thymine
  misc_feature 1..22: note = Antisense oligonucleotide
  modified_base 1: mod_base = OTHER; note = misc_feature - bicyclic nucleic acid scaffold modification
  modified_base 8: mod_base = OTHER; note = misc_feature - bicyclic nucleic acid scaffold modification
  modified_base 22: mod_base = OTHER; note = misc_feature - bicyclic nucleic acid scaffold modification
  source 1..22: mol_type = other RNA
caggcttcccaatttttcctgt

SEQ ID NO: 3596 - RNA, 22 nt, synthetic construct
  modified_base 22: mod_base = OTHER; note = thymine
  misc_feature 1..22: note = Antisense oligonucleotide
  modified_base 1: mod_base = OTHER; note = misc_feature - bicyclic nucleic acid scaffold modification
  modified_base 10: mod_base = OTHER; note = misc_feature - bicyclic nucleic acid scaffold modification
  modified_base 22: mod_base = OTHER; note = misc_feature - bicyclic nucleic acid scaffold modification
  source 1..22: mol_type = other RNA
caggcttcccaatttttcctgt

SEQ ID NO: 3597 - RNA, 22 nt, synthetic construct
  modified_base 22: mod_base = OTHER; note = thymine
  misc_feature 1..22: note = Antisense oligonucleotide
  modified_base 1: mod_base = OTHER; note = misc_feature - bicyclic nucleic acid scaffold modification
  modified_base 19: mod_base = OTHER; note = misc_feature - bicyclic nucleic acid scaffold modification
  modified_base 22: mod_base = OTHER; note = misc_feature - bicyclic nucleic acid scaffold modification
  source 1..22: mol_type = other RNA
caggcttcccaatttttcctgt

SEQ ID NO: 3598 - RNA, 22 nt, synthetic construct
  modified_base 22: mod_base = OTHER; note = thymine
  misc_feature 1..22: note = Antisense oligonucleotide
  modified_base 1: mod_base = OTHER; note = misc_feature - bicyclic nucleic acid scaffold modification
  modified_base 10: mod_base = OTHER; note = misc_feature - bicyclic nucleic acid scaffold modification
  modified_base 18: mod_base = OTHER; note = misc_feature - bicyclic nucleic acid scaffold modification
  modified_base 22: mod_base = OTHER; note = misc_feature - bicyclic nucleic acid scaffold modification
  source 1..22: mol_type = other RNA
caggcttcccaatttttcctgt

SEQ ID NO: 3599 - RNA, 22 nt, synthetic construct
  modified_base 22: mod_base = OTHER; note = thymine
  misc_feature 1..22: note = Antisense oligonucleotide
  modified_base 1: mod_base = OTHER; note = misc_feature - bicyclic nucleic acid scaffold modification
  modified_base 5: mod_base = OTHER; note = misc_feature - bicyclic nucleic acid scaffold modification
  modified_base 10: mod_base = OTHER; note = misc_feature - bicyclic nucleic acid scaffold modification
  modified_base 22: mod_base = OTHER; note = misc_feature - bicyclic nucleic acid scaffold modification
  source 1..22: mol_type = other RNA
caggcttcccaatttttcctgt

SEQ ID NO: 3600 - RNA, 22 nt, synthetic construct
  modified_base 22: mod_base = OTHER; note = thymine
  misc_feature 1..22: note = Antisense oligonucleotide
  modified_base 1: mod_base = OTHER; note = misc_feature - bicyclic nucleic acid scaffold modification
  modified_base 5: mod_base = OTHER; note = misc_feature - bicyclic nucleic acid scaffold modification
  modified_base 10: mod_base = OTHER; note = misc_feature - bicyclic nucleic acid scaffold modification
  modified_base 19: mod_base = OTHER; note = misc_feature - bicyclic nucleic acid scaffold modification
  modified_base 22: mod_base = OTHER; note = misc_feature - bicyclic nucleic acid scaffold modification
  source 1..22: mol_type = other RNA
caggcttcccaatttttcctgt

SEQ ID NO: 3601 - RNA, 22 nt, synthetic construct
  modified_base 22: mod_base = OTHER; note = thymine
  misc_feature 1..22: note = Antisense oligonucleotide
  modified_base 1: mod_base = OTHER; note = misc_feature - bicyclic nucleic acid scaffold modification
  modified_base 3: mod_base = OTHER; note = misc_feature - bicyclic nucleic acid scaffold modification
  modified_base 8: mod_base = OTHER; note = misc_feature - bicyclic nucleic acid scaffold modification
  modified_base 18: mod_base = OTHER; note = misc_feature - bicyclic nucleic acid scaffold modification
  modified_base 22: mod_base = OTHER; note = misc_feature - bicyclic nucleic acid scaffold modification
  source 1..22: mol_type = other RNA
caggcttcccaatttttcctgt

SEQ ID NO: 3602 - RNA, 22 nt, synthetic construct
  modified_base 22: mod_base = OTHER; note = thymine
  misc_feature 1..22: note = Antisense oligonucleotide
  modified_base 1..2: mod_base = OTHER; note = misc_feature - bicyclic nucleic acid scaffold modification
  modified_base 21..22: mod_base = OTHER; note = misc_feature - bicyclic nucleic acid scaffold modification
  source 1..22: mol_type = other RNA
caggcttcccaatttttcctgt

SEQ ID NO: 3603 - RNA, 22 nt, synthetic construct
  modified_base 22: mod_base = OTHER; note = thymine
  misc_feature 1..22: note = Antisense oligonucleotide
  modified_base 1..2: mod_base = OTHER; note = misc_feature - bicyclic nucleic acid scaffold modification
  modified_base 10: mod_base = OTHER; note = misc_feature - bicyclic nucleic acid scaffold modification
  modified_base 21..22: mod_base = OTHER; note = misc_feature - bicyclic nucleic acid scaffold modification
  source 1..22: mol_type = other RNA
caggcttcccaatttttcctgt

SEQ ID NO: 3604 - RNA, 22 nt, synthetic construct
  misc_feature 1..22: note = Antisense oligonucleotide
  modified_base 1: mod_base = OTHER; note = misc_feature - bicyclic nucleic acid scaffold modification
  modified_base 22: mod_base = OTHER; note = misc_feature - bicyclic nucleic acid scaffold modification
  source 1..22: mol_type = other RNA
aggcttcccaatttttcctgta

SEQ ID NO: 3605 - RNA, 22 nt, synthetic construct
  misc_feature 1..22: note = Antisense oligonucleotide
  modified_base 1..2: mod_base = OTHER; note = misc_feature - bicyclic nucleic acid scaffold modification
  modified_base 22: mod_base = OTHER; note = misc_feature - bicyclic nucleic acid scaffold modification
  source 1..22: mol_type = other RNA
aggcttcccaatttttcctgta

SEQ ID NO: 3606 - RNA, 22 nt, synthetic construct
  misc_feature 1..22: note = Antisense oligonucleotide
  modified_base 1: mod_base = OTHER; note = misc_feature - bicyclic nucleic acid scaffold modification
  modified_base 3: mod_base = OTHER; note = misc_feature - bicyclic nucleic acid scaffold modification
  modified_base 22: mod_base = OTHER; note = misc_feature - bicyclic nucleic acid scaffold modification
  source 1..22: mol_type = other RNA
aggcttcccaatttttcctgta

SEQ ID NO: 3607 - RNA, 22 nt, synthetic construct
  misc_feature 1..22: note = Antisense oligonucleotide
  modified_base 1: mod_base = OTHER; note = misc_feature - bicyclic nucleic acid scaffold modification
  modified_base 20: mod_base = OTHER; note = misc_feature - bicyclic nucleic acid scaffold modification
  modified_base 22: mod_base = OTHER; note = misc_feature - bicyclic nucleic acid scaffold modification
  source 1..22: mol_type = other RNA
aggcttcccaatttttcctgta

SEQ ID NO: 3608 - RNA, 22 nt, synthetic construct
  misc_feature 1..22: note = Antisense oligonucleotide
  modified_base 1..2: mod_base = OTHER; note = misc_feature - bicyclic nucleic acid scaffold modification
  modified_base 20: mod_base = OTHER; note = misc_feature - bicyclic nucleic acid scaffold modification
  modified_base 22: mod_base = OTHER; note = misc_feature - bicyclic nucleic acid scaffold modification
  source 1..22: mol_type = other RNA
aggcttcccaatttttcctgta

SEQ ID NO: 3609 - RNA, 22 nt, synthetic construct
  misc_feature 1..22: note = Antisense oligonucleotide
  modified_base 1: mod_base = OTHER; note = misc_feature - bicyclic nucleic acid scaffold modification
  modified_base 4: mod_base = OTHER; note = misc_feature - bicyclic nucleic acid scaffold modification
  modified_base 22: mod_base = OTHER; note = misc_feature - bicyclic nucleic acid scaffold modification
  source 1..22: mol_type = other RNA
aggcttcccaatttttcctgta

SEQ ID NO: 3610 - RNA, 22 nt, synthetic construct
  misc_feature 1..22: note = Antisense oligonucleotide
  modified_base 1: mod_base = OTHER; note = misc_feature - bicyclic nucleic acid scaffold modification
  modified_base 9: mod_base = OTHER; note = misc_feature - bicyclic nucleic acid scaffold modification
  modified_base 22: mod_base = OTHER; note = misc_feature - bicyclic nucleic acid scaffold modification
  source 1..22: mol_type = other RNA
aggcttcccaatttttcctgta

SEQ ID NO: 3611 - RNA, 22 nt, synthetic construct
  misc_feature 1..22: note = Antisense oligonucleotide
  modified_base 1: mod_base = OTHER; note = misc_feature - bicyclic nucleic acid scaffold modification
  modified_base 18: mod_base = OTHER; note = misc_feature - bicyclic nucleic acid scaffold modification
  modified_base 22: mod_base = OTHER; note = misc_feature - bicyclic nucleic acid scaffold modification
  source 1..22: mol_type = other RNA
aggcttcccaatttttcctgta

SEQ ID NO: 3612 - RNA, 22 nt, synthetic construct
  misc_feature 1..22: note = Antisense oligonucleotide
  modified_base 1: mod_base = OTHER; note = misc_feature - bicyclic nucleic acid scaffold modification
  modified_base 7: mod_base = OTHER; note = misc_feature - bicyclic nucleic acid scaffold modification
  modified_base 17: mod_base = OTHER; note = misc_feature - bicyclic nucleic acid scaffold modification
  modified_base 22: mod_base = OTHER; note = misc_feature - bicyclic nucleic acid scaffold modification
  source 1..22: mol_type = other RNA
aggcttcccaatttttcctgta

SEQ ID NO: 3613 - RNA, 22 nt, synthetic construct
  misc_feature 1..22: note = Antisense oligonucleotide
  modified_base 1: mod_base = OTHER; note = misc_feature - bicyclic nucleic acid scaffold modification
  modified_base 22: mod_base = OTHER; note = misc_feature - bicyclic nucleic acid scaffold modification
  source 1..22: mol_type = other RNA
aggcttcccaatttttcctgta

SEQ ID NO: 3614 - RNA, 22 nt, synthetic construct
  misc_feature 1..22: note = Antisense oligonucleotide
  modified_base 1: mod_base = OTHER; note = misc_feature - bicyclic nucleic acid scaffold modification
  modified_base 4: mod_base = OTHER; note = misc_feature - bicyclic nucleic acid scaffold modification
  modified_base 9: mod_base = OTHER; note = misc_feature - bicyclic nucleic acid scaffold modification
  modified_base 18: mod_base = OTHER; note = misc_feature - bicyclic nucleic acid scaffold modification
  modified_base 22: mod_base = OTHER; note = misc_feature - bicyclic nucleic acid scaffold modification
  source 1..22: mol_type = other RNA
aggcttcccaatttttcctgta

SEQ ID NO: 3615 - RNA, 22 nt, synthetic construct
  modified_base 21: mod_base = OTHER; note = thymine
  misc_feature 1..22: note = Antisense oligonucleotide
  modified_base 1..2: mod_base = OTHER; note = misc_feature - bicyclic nucleic acid scaffold modification
  modified_base 21..22: mod_base = OTHER; note = misc_feature - bicyclic nucleic acid scaffold modification
  source 1..22: mol_type = other RNA
aggcttcccaatttttcctgta

SEQ ID NO: 3616 - RNA, 22 nt, synthetic construct
  modified_base 21: mod_base = OTHER; note = thymine
  misc_feature 1..22: note = Antisense oligonucleotide
  modified_base 1..2: mod_base = OTHER; note = misc_feature - bicyclic nucleic acid scaffold modification
  modified_base 9: mod_base = OTHER; note = misc_feature - bicyclic nucleic acid scaffold modification
  modified_base 21..22: mod_base = OTHER; note = misc_feature - bicyclic nucleic acid scaffold modification
  source 1..22: mol_type = other RNA
aggcttcccaatttttcctgta

SEQ ID NO: 3617 - RNA, 22 nt, synthetic construct
  misc_feature 1..22: note = Antisense oligonucleotide
  modified_base 1: mod_base = OTHER; note = misc_feature - bicyclic nucleic acid scaffold modification
  modified_base 22: mod_base = OTHER; note = misc_feature - bicyclic nucleic acid scaffold modification
  source 1..22: mol_type = other RNA
ggcttcccaatttttcctgtag

SEQ ID NO: 3618 - RNA, 22 nt, synthetic construct
  misc_feature 1..22: note = Antisense oligonucleotide
  modified_base 1..2: mod_base = OTHER; note = misc_feature - bicyclic nucleic acid scaffold modification
  modified_base 22: mod_base = OTHER; note = misc_feature - bicyclic nucleic acid scaffold modification
  source 1..22: mol_type = other RNA
ggcttcccaatttttcctgtag

SEQ ID NO: 3619 - RNA, 22 nt, synthetic construct
  misc_feature 1..22: note = Antisense oligonucleotide
  modified_base 1: mod_base = OTHER; note = misc_feature - bicyclic nucleic acid scaffold modification
  modified_base 19: mod_base = OTHER; note = misc_feature - bicyclic nucleic acid scaffold modification
  modified_base 22: mod_base = OTHER; note = misc_feature - bicyclic nucleic acid scaffold modification
  source 1..22: mol_type = other RNA
ggcttcccaatttttcctgtag

SEQ ID NO: 3620 - RNA, 22 nt, synthetic construct
  misc_feature 1..22: note = Antisense oligonucleotide
  modified_base 1..2: mod_base = OTHER; note = misc_feature - bicyclic nucleic acid scaffold modification
  modified_base 19: mod_base = OTHER; note = misc_feature - bicyclic nucleic acid scaffold modification
  modified_base 22: mod_base = OTHER; note = misc_feature - bicyclic nucleic acid scaffold modification
  source 1..22: mol_type = other RNA
ggcttcccaatttttcctgtag

SEQ ID NO: 3621 - RNA, 22 nt, synthetic construct
  misc_feature 1..22: note = Antisense oligonucleotide
  modified_base 1: mod_base = OTHER; note = misc_feature - bicyclic nucleic acid scaffold modification
  modified_base 17: mod_base = OTHER; note = misc_feature - bicyclic nucleic acid scaffold modification
  modified_base 22: mod_base = OTHER; note = misc_feature - bicyclic nucleic acid scaffold modification
  source 1..22: mol_type = other RNA
ggcttcccaatttttcctgtag

SEQ ID NO: 3622 - RNA, 22 nt, synthetic construct
  misc_feature 1..22: note = Antisense oligonucleotide
  modified_base 1: mod_base = OTHER; note = misc_feature - bicyclic nucleic acid scaffold modification
  modified_base 8: mod_base = OTHER; note = misc_feature - bicyclic nucleic acid scaffold modification
  modified_base 22: mod_base = OTHER; note = misc_feature - bicyclic nucleic acid scaffold modification
  source 1..22: mol_type = other RNA
ggcttcccaatttttcctgtag

SEQ ID NO: 3623 - RNA, 22 nt, synthetic construct
  misc_feature 1..22: note = Antisense oligonucleotide
  modified_base 1: mod_base = OTHER; note = misc_feature - bicyclic nucleic acid scaffold modification
  modified_base 3: mod_base = OTHER; note = misc_feature - bicyclic nucleic acid scaffold modification
  modified_base 22: mod_base = OTHER; note = misc_feature - bicyclic nucleic acid scaffold modification
  source 1..22: mol_type = other RNA
ggcttcccaatttttcctgtag

SEQ ID NO: 3624 - RNA, 22 nt, synthetic construct
  misc_feature 1..22: note = Antisense oligonucleotide
  modified_base 1: mod_base = OTHER; note = misc_feature - bicyclic nucleic acid scaffold modification
  modified_base 6: mod_base = OTHER; note = misc_feature - bicyclic nucleic acid scaffold modification
  modified_base 16: mod_base = OTHER; note = misc_feature - bicyclic nucleic acid scaffold modification
  modified_base 22: mod_base = OTHER; note = misc_feature - bicyclic nucleic acid scaffold modification
  source 1..22: mol_type = other RNA
ggcttcccaatttttcctgtag

SEQ ID NO: 3625 - RNA, 22 nt, synthetic construct
  misc_feature 1..22: note = Antisense oligonucleotide
  modified_base 1: mod_base = OTHER; note = misc_feature - bicyclic nucleic acid scaffold modification
  modified_base 8: mod_base = OTHER; note = misc_feature - bicyclic nucleic acid scaffold modification
  modified_base 17: mod_base = OTHER; note = misc_feature - bicyclic nucleic acid scaffold modification
  modified_base 22: mod_base = OTHER; note = misc_feature - bicyclic nucleic acid scaffold modification
  source 1..22: mol_type = other RNA
ggcttcccaatttttcctgtag

SEQ ID NO: 3626 - RNA, 22 nt, synthetic construct
  misc_feature 1..22: note = Antisense oligonucleotide
  modified_base 1: mod_base = OTHER; note = misc_feature - bicyclic nucleic acid scaffold modification
  modified_base 3: mod_base = OTHER; note = misc_feature - bicyclic nucleic acid scaffold modification
  modified_base 8: mod_base = OTHER; note = misc_feature - bicyclic nucleic acid scaffold modification
  modified_base 17: mod_base = OTHER; note = misc_feature - bicyclic nucleic acid scaffold modification
  modified_base 22: mod_base = OTHER; note = misc_feature - bicyclic nucleic acid scaffold modification
  source 1..22: mol_type = other RNA
ggcttcccaatttttcctgtag

SEQ ID NO: 3627 - RNA, 22 nt, synthetic construct
  misc_feature 1..22: note = Antisense oligonucleotide
  modified_base 1..2: mod_base = OTHER; note = misc_feature - bicyclic nucleic acid scaffold modification
  modified_base 21..22: mod_base = OTHER; note = misc_feature - bicyclic nucleic acid scaffold modification
  source 1..22: mol_type = other RNA
ggcttcccaatttttcctgtag

SEQ ID NO: 3628 - RNA, 22 nt, synthetic construct
  misc_feature 1..22: note = Antisense oligonucleotide
  modified_base 1..2: mod_base = OTHER; note = misc_feature - bicyclic nucleic acid scaffold modification
  modified_base 8: mod_base = OTHER; note = misc_feature - bicyclic nucleic acid scaffold modification
  modified_base 16: mod_base = OTHER; note = misc_feature - bicyclic nucleic acid scaffold modification
  modified_base 21..22: mod_base = OTHER; note = misc_feature - bicyclic nucleic acid scaffold modification
  source 1..22: mol_type = other RNA
ggcttcccaatttttcctgtag

SEQ ID NO: 3629 - RNA, 20 nt, synthetic construct
  modified_base 20: mod_base = OTHER; note = thymine
  misc_feature 1..20: note = Antisense oligonucleotide
  modified_base 1: mod_base = OTHER; note = misc_feature - bicyclic nucleic acid scaffold modification
  modified_base 20: mod_base = OTHER; note = misc_feature - bicyclic nucleic acid scaffold modification
  source 1..20: mol_type = other RNA
caggcttcccaatttttcct

SEQ ID NO: 3630 - RNA, 20 nt, synthetic construct
  modified_base 20: mod_base = OTHER; note = thymine
  misc_feature 1..20: note = Antisense oligonucleotide
  modified_base 1: mod_base = OTHER; note = misc_feature - bicyclic nucleic acid scaffold modification
  modified_base 3: mod_base = OTHER; note = misc_feature - bicyclic nucleic acid scaffold modification
  modified_base 20: mod_base = OTHER; note = misc_feature - bicyclic nucleic acid scaffold modification
  source 1..20: mol_type = other RNA
caggcttcccaatttttcct

SEQ ID NO: 3631 - RNA, 20 nt, synthetic construct
  modified_base 20: mod_base = OTHER; note = thymine
  misc_feature 1..20: note = Antisense oligonucleotide
  modified_base 1: mod_base = OTHER; note = misc_feature - bicyclic nucleic acid scaffold modification
  modified_base 4: mod_base = OTHER; note = misc_feature - bicyclic nucleic acid scaffold modification
  modified_base 20: mod_base = OTHER; note = misc_feature - bicyclic nucleic acid scaffold modification
  source 1..20: mol_type = other RNA
caggcttcccaatttttcct

SEQ ID NO: 3632 - RNA, 20 nt, synthetic construct
  modified_base 20: mod_base = OTHER; note = thymine
  misc_feature 1..20: note = Antisense oligonucleotide
  modified_base 1: mod_base = OTHER; note = misc_feature - bicyclic nucleic acid scaffold modification
  modified_base 5: mod_base = OTHER; note = misc_feature - bicyclic nucleic acid scaffold modification
  modified_base 20: mod_base = OTHER; note = misc_feature - bicyclic nucleic acid scaffold modification
  source 1..20: mol_type = other RNA
caggcttcccaatttttcct

SEQ ID NO: 3633 - RNA, 20 nt, synthetic construct
  modified_base 20: mod_base = OTHER; note = thymine
  misc_feature 1..20: note = Antisense oligonucleotide
  modified_base 1: mod_base = OTHER; note = misc_feature - bicyclic nucleic acid scaffold modification
  modified_base 8: mod_base = OTHER; note = misc_feature - bicyclic nucleic acid scaffold modification
  modified_base 20: mod_base = OTHER; note = misc_feature - bicyclic nucleic acid scaffold modification
  source 1..20: mol_type = other RNA
caggcttcccaatttttcct

SEQ ID NO: 3634 - RNA, 20 nt, synthetic construct
  modified_base 20: mod_base = OTHER; note = thymine
  misc_feature 1..20: note = Antisense oligonucleotide
  modified_base 1: mod_base = OTHER; note = misc_feature - bicyclic nucleic acid scaffold modification
  modified_base 10: mod_base = OTHER; note = misc_feature - bicyclic nucleic acid scaffold modification
  modified_base 20: mod_base = OTHER; note = misc_feature - bicyclic nucleic acid scaffold modification
  source 1..20: mol_type = other RNA
caggcttcccaatttttcct

SEQ ID NO: 3635 - RNA, 20 nt, synthetic construct
  modified_base 20: mod_base = OTHER; note = thymine
  misc_feature 1..20: note = Antisense oligonucleotide
  modified_base 1: mod_base = OTHER; note = misc_feature - bicyclic nucleic acid scaffold modification
  modified_base 18: mod_base = OTHER; note = misc_feature - bicyclic nucleic acid scaffold modification
  modified_base 20: mod_base = OTHER; note = misc_feature - bicyclic nucleic acid scaffold modification
  source 1..20: mol_type = other RNA
caggcttcccaatttttcct

SEQ ID NO: 3636 - RNA, 20 nt, synthetic construct
  modified_base 20: mod_base = OTHER; note = thymine
  misc_feature 1..20: note = Antisense oligonucleotide
  modified_base 1: mod_base = OTHER; note = misc_feature - bicyclic nucleic acid scaffold modification
  modified_base 5: mod_base = OTHER; note = misc_feature - bicyclic nucleic acid scaffold modification
  modified_base 18: mod_base = OTHER; note = misc_feature - bicyclic nucleic acid scaffold modification
  modified_base 20: mod_base = OTHER; note = misc_feature - bicyclic nucleic acid scaffold modification
  source 1..20: mol_type = other RNA
caggcttcccaatttttcct

SEQ ID NO: 3637 - RNA, 20 nt, synthetic construct
  modified_base 20: mod_base = OTHER; note = thymine
  misc_feature 1..20: note = Antisense oligonucleotide
  modified_base 1: mod_base = OTHER; note = misc_feature - bicyclic nucleic acid scaffold modification
  modified_base 5: mod_base = OTHER; note = misc_feature - bicyclic nucleic acid scaffold modification
  modified_base 10: mod_base = OTHER; note = misc_feature - bicyclic nucleic acid scaffold modification
  modified_base 20: mod_base = OTHER; note = misc_feature - bicyclic nucleic acid scaffold modification
  source 1..20: mol_type = other RNA
caggcttcccaatttttcct

SEQ ID NO: 3638 - RNA, 20 nt, synthetic construct
  modified_base 20: mod_base = OTHER; note = thymine
  misc_feature 1..20: note = Antisense oligonucleotide
  modified_base 1: mod_base = OTHER; note = misc_feature - bicyclic nucleic acid scaffold modification
  modified_base 4: mod_base = OTHER; note = misc_feature - bicyclic nucleic acid scaffold modification
  modified_base 18: mod_base = OTHER; note = misc_feature - bicyclic nucleic acid scaffold modification
  modified_base 20: mod_base = OTHER; note = misc_feature - bicyclic nucleic acid scaffold modification
  source 1..20: mol_type = other RNA
caggcttcccaatttttcct

SEQ ID NO: 3639 - RNA, 20 nt, synthetic construct
  modified_base 20: mod_base = OTHER; note = thymine
  misc_feature 1..20: note = Antisense oligonucleotide
  modified_base 1..2: mod_base = OTHER; note = misc_feature - bicyclic nucleic acid scaffold modification
  modified_base 19..20: mod_base = OTHER; note = misc_feature - bicyclic nucleic acid scaffold modification
  source 1..20: mol_type = other RNA
caggcttcccaatttttcct

SEQ ID NO: 3640 - RNA, 20 nt, synthetic construct
  modified_base 20: mod_base = OTHER; note = thymine
  misc_feature 1..20: note = Antisense oligonucleotide
  modified_base 1..2: mod_base = OTHER; note = misc_feature - bicyclic nucleic acid scaffold modification
  modified_base 10: mod_base = OTHER; note = misc_feature - bicyclic nucleic acid scaffold modification
  modified_base 19..20: mod_base = OTHER; note = misc_feature - bicyclic nucleic acid scaffold modification
  source 1..20: mol_type = other RNA
caggcttcccaatttttcct

SEQ ID NO: 3641 - RNA, 20 nt, synthetic construct
  misc_feature 1..20: note = Antisense oligonucleotide
  modified_base 1: mod_base = OTHER; note = misc_feature - bicyclic nucleic acid scaffold modification
  modified_base 20: mod_base = OTHER; note = misc_feature - bicyclic nucleic acid scaffold modification
  source 1..20: mol_type = other RNA
aggcttcccaatttttcctg

SEQ ID NO: 3642 - RNA, 20 nt, synthetic construct
  misc_feature 1..20: note = Antisense oligonucleotide
  modified_base 1..2: mod_base = OTHER; note = misc_feature - bicyclic nucleic acid scaffold modification
  modified_base 20: mod_base = OTHER; note = misc_feature - bicyclic nucleic acid scaffold modification
  source 1..20: mol_type = other RNA
aggcttcccaatttttcctg

SEQ ID NO: 3643 - RNA, 20 nt, synthetic construct
  misc_feature 1..20: note = Antisense oligonucleotide
  modified_base 1: mod_base = OTHER; note = misc_feature - bicyclic nucleic acid scaffold modification
  modified_base 3: mod_base = OTHER; note = misc_feature - bicyclic nucleic acid scaffold modification
  modified_base 20: mod_base = OTHER; note = misc_feature - bicyclic nucleic acid scaffold modification
  source 1..20: mol_type = other RNA
aggcttcccaatttttcctg

SEQ ID NO: 3644 - RNA, 20 nt, synthetic construct
  misc_feature 1..20: note = Antisense oligonucleotide
  modified_base 1: mod_base = OTHER; note = misc_feature - bicyclic nucleic acid scaffold modification
  modified_base 4: mod_base = OTHER; note = misc_feature - bicyclic nucleic acid scaffold modification
  modified_base 20: mod_base = OTHER; note = misc_feature - bicyclic nucleic acid scaffold modification
  source 1..20: mol_type = other RNA
aggcttcccaatttttcctg

SEQ ID NO: 3645 - RNA, 20 nt, synthetic construct
  misc_feature 1..20: note = Antisense oligonucleotide
  modified_base 1: mod_base = OTHER; note = misc_feature - bicyclic nucleic acid scaffold modification
  modified_base 7: mod_base = OTHER; note = misc_feature - bicyclic nucleic acid scaffold modification
  modified_base 20: mod_base = OTHER; note = misc_feature - bicyclic nucleic acid scaffold modification
  source 1..20: mol_type = other RNA
aggcttcccaatttttcctg

SEQ ID NO: 3646 - RNA, 20 nt, synthetic construct
  misc_feature 1..20: note = Antisense oligonucleotide
  modified_base 1: mod_base = OTHER; note = misc_feature - bicyclic nucleic acid scaffold modification
  modified_base 9: mod_base = OTHER; note = misc_feature - bicyclic nucleic acid scaffold modification
  modified_base 20: mod_base = OTHER; note = misc_feature - bicyclic nucleic acid scaffold modification
  source 1..20: mol_type = other RNA
aggcttcccaatttttcctg

SEQ ID NO: 3647 - RNA, 20 nt, synthetic construct
  misc_feature 1..20: note = Antisense oligonucleotide
  modified_base 1: mod_base = OTHER; note = misc_feature - bicyclic nucleic acid scaffold modification
  modified_base 17: mod_base = OTHER; note = misc_feature - bicyclic nucleic acid scaffold modification
  modified_base 20: mod_base = OTHER; note = misc_feature - bicyclic nucleic acid scaffold modification
  source 1..20: mol_type = other RNA
aggcttcccaatttttcctg

SEQ ID NO: 3648 - RNA, 20 nt, synthetic construct
  misc_feature 1..20: note = Antisense oligonucleotide
  modified_base 1: mod_base = OTHER; note = misc_feature - bicyclic nucleic acid scaffold modification
  modified_base 9: mod_base = OTHER; note = misc_feature - bicyclic nucleic acid scaffold modification
  modified_base 18: mod_base = OTHER; note = misc_feature - bicyclic nucleic acid scaffold modification
  modified_base 20: mod_base = OTHER; note = misc_feature - bicyclic nucleic acid scaffold modification
  source 1..20: mol_type = other RNA
aggcttcccaatttttcctg

SEQ ID NO: 3649 - RNA, 20 nt, synthetic construct
  misc_feature 1..20: note = Antisense oligonucleotide
  modified_base 1: mod_base = OTHER; note = misc_feature - bicyclic nucleic acid scaffold modification
  modified_base 4: mod_base = OTHER; note = misc_feature - bicyclic nucleic acid scaffold modification
  modified_base 9: mod_base = OTHER; note = misc_feature - bicyclic nucleic acid scaffold modification
  modified_base 20: mod_base = OTHER; note = misc_feature - bicyclic nucleic acid scaffold modification
  source 1..20: mol_type = other RNA
aggcttcccaatttttcctg

SEQ ID NO: 3650 - RNA, 20 nt, synthetic construct
  misc_feature 1..20: note = Antisense oligonucleotide
  modified_base 1: mod_base = OTHER; note = misc_feature - bicyclic nucleic acid scaffold modification
  modified_base 3: mod_base = OTHER; note = misc_feature - bicyclic nucleic acid scaffold modification
  modified_base 17: mod_base = OTHER; note = misc_feature - bicyclic nucleic acid scaffold modification
  modified_base 20: mod_base = OTHER; note = misc_feature - bicyclic nucleic acid scaffold modification
  source 1..20: mol_type = other RNA
aggcttcccaatttttcctg

SEQ ID NO: 3651 - RNA, 20 nt, synthetic construct
  modified_base 19: mod_base = OTHER; note = thymine
  misc_feature 1..20: note = Antisense oligonucleotide
  modified_base 1..2: mod_base = OTHER; note = misc_feature - bicyclic nucleic acid scaffold modification
  modified_base 19..20: mod_base = OTHER; note = misc_feature - bicyclic nucleic acid scaffold modification
  source 1..20: mol_type = other RNA
aggcttcccaatttttcctg

SEQ ID NO: 3652 - RNA, 20 nt, synthetic construct
  modified_base 19: mod_base = OTHER; note = thymine
  misc_feature 1..20: note = Antisense oligonucleotide
  modified_base 1..2: mod_base = OTHER; note = misc_feature - bicyclic nucleic acid scaffold modification
  modified_base 9: mod_base = OTHER; note = misc_feature - bicyclic nucleic acid scaffold modification
  modified_base 19..20: mod_base = OTHER; note = misc_feature - bicyclic nucleic acid scaffold modification
  source 1..20: mol_type = other RNA
aggcttcccaatttttcctg

SEQ ID NO: 3653 - RNA, 20 nt, synthetic construct
  modified_base 20: mod_base = OTHER; note = thymine
  misc_feature 1..20: note = Antisense oligonucleotide
  modified_base 1: mod_base = OTHER; note = misc_feature - bicyclic nucleic acid scaffold modification
  modified_base 20: mod_base = OTHER; note = misc_feature - bicyclic nucleic acid scaffold modification
  source 1..20: mol_type = other RNA
ggcttcccaatttttcctgt

SEQ ID NO: 3654 - RNA, 20 nt, synthetic construct
  modified_base 20: mod_base = OTHER; note = thymine
  misc_feature 1..20: note = Antisense oligonucleotide
  modified_base 1..2: mod_base = OTHER; note = misc_feature - bicyclic nucleic acid scaffold modification
  modified_base 20: mod_base = OTHER; note = misc_feature - bicyclic nucleic acid scaffold modification
  source 1..20: mol_type = other RNA
ggcttcccaatttttcctgt

SEQ ID NO: 3655 - RNA, 20 nt, synthetic construct
  modified_base 20: mod_base = OTHER; note = thymine
  misc_feature 1..20: note = Antisense oligonucleotide
  modified_base 1: mod_base = OTHER; note = misc_feature - bicyclic nucleic acid scaffold modification
  modified_base 19..20: mod_base = OTHER; note = misc_feature - bicyclic nucleic acid scaffold modification
  source 1..20: mol_type = other RNA
ggcttcccaatttttcctgt

SEQ ID NO: 3656 - RNA, 20 nt, synthetic construct
  modified_base 20: mod_base = OTHER; note = thymine
  misc_feature 1..20: note = Antisense oligonucleotide
  modified_base 1..2: mod_base = OTHER; note = misc_feature - bicyclic nucleic acid scaffold modification
  modified_base 19..20: mod_base = OTHER; note = misc_feature - bicyclic nucleic acid scaffold modification
  source 1..20: mol_type = other RNA
ggcttcccaatttttcctgt

SEQ ID NO: 3657 - RNA, 20 nt, synthetic construct
  modified_base 20: mod_base = OTHER; note = thymine
  misc_feature 1..20: note = Antisense oligonucleotide
  modified_base 1: mod_base = OTHER; note = misc_feature - bicyclic nucleic acid scaffold modification
  modified_base 3: mod_base = OTHER; note = misc_feature - bicyclic nucleic acid scaffold modification
  modified_base 20: mod_base = OTHER; note = misc_feature - bicyclic nucleic acid scaffold modification
  source 1..20: mol_type = other RNA
ggcttcccaatttttcctgt

SEQ ID NO: 3658 - RNA, 20 nt, synthetic construct
  modified_base 20: mod_base = OTHER; note = thymine
  misc_feature 1..20: note = Antisense oligonucleotide
  modified_base 1: mod_base = OTHER; note = misc_feature - bicyclic nucleic acid scaffold modification
  modified_base 6: mod_base = OTHER; note = misc_feature - bicyclic nucleic acid scaffold modification
  modified_base 20: mod_base = OTHER; note = misc_feature - bicyclic nucleic acid scaffold modification
  source 1..20: mol_type = other RNA
ggcttcccaatttttcctgt

SEQ ID NO: 3659 - RNA, 20 nt, synthetic construct
  modified_base 20: mod_base = OTHER; note = thymine
  misc_feature 1..20: note = Antisense oligonucleotide
  modified_base 1: mod_base = OTHER; note = misc_feature - bicyclic nucleic acid scaffold modification
  modified_base 8: mod_base = OTHER; note = misc_feature - bicyclic nucleic acid scaffold modification
  modified_base 20: mod_base = OTHER; note = misc_feature - bicyclic nucleic acid scaffold modification
  source 1..20: mol_type = other RNA
ggcttcccaatttttcctgt

SEQ ID NO: 3660 - RNA, 20 nt, synthetic construct
  modified_base 20: mod_base = OTHER; note = thymine
  misc_feature 1..20: note = Antisense oligonucleotide
  modified_base 1: mod_base = OTHER; note = misc_feature - bicyclic nucleic acid scaffold modification
  modified_base 16: mod_base = OTHER; note = misc_feature - bicyclic nucleic acid scaffold modification
  modified_base 20: mod_base = OTHER; note = misc_feature - bicyclic nucleic acid scaffold modification
  source 1..20: mol_type = other RNA
ggcttcccaatttttcctgt

SEQ ID NO: 3661 - RNA, 20 nt, synthetic construct
  modified_base 20: mod_base = OTHER; note = thymine
  misc_feature 1..20: note = Antisense oligonucleotide
  modified_base 1: mod_base = OTHER; note = misc_feature - bicyclic nucleic acid scaffold modification
  modified_base 8: mod_base = OTHER; note = misc_feature - bicyclic nucleic acid scaffold modification
  modified_base 17: mod_base = OTHER; note = misc_feature - bicyclic nucleic acid scaffold modification
  modified_base 20: mod_base = OTHER; note = misc_feature - bicyclic nucleic acid scaffold modification
  source 1..20: mol_type = other RNA
ggcttcccaatttttcctgt

SEQ ID NO: 3662 - RNA, 20 nt, synthetic construct
  modified_base 20: mod_base = OTHER; note = thymine
  misc_feature 1..20: note = Antisense oligonucleotide
  modified_base 1: mod_base = OTHER; note = misc_feature - bicyclic nucleic acid scaffold modification
  modified_base 3: mod_base = OTHER; note = misc_feature - bicyclic nucleic acid scaffold modification
  modified_base 6: mod_base = OTHER; note = misc_feature - bicyclic nucleic acid scaffold modification
  modified_base 16: mod_base = OTHER; note = misc_feature - bicyclic nucleic acid scaffold modification
  modified_base 20: mod_base = OTHER; note = misc_feature - bicyclic nucleic acid scaffold modification
  source 1..20: mol_type = other RNA
ggcttcccaatttttcctgt

SEQ ID NO: 3663 - RNA, 20 nt, synthetic construct
  modified_base 20: mod_base = OTHER; note = thymine
  misc_feature 1..20: note = Antisense oligonucleotide
  modified_base 1..2: mod_base = OTHER; note = misc_feature - bicyclic nucleic acid scaffold modification
  modified_base 8: mod_base = OTHER; note = misc_feature - bicyclic nucleic acid scaffold modification
  modified_base 19..20: mod_base = OTHER; note = misc_feature - bicyclic nucleic acid scaffold modification
  source 1..20: mol_type = other RNA
ggcttcccaatttttcctgt

SEQ ID NO: 3664 - RNA, 20 nt, synthetic construct
  misc_feature 1..20: note = Antisense oligonucleotide
  modified_base 1: mod_base = OTHER; note = misc_feature - bicyclic nucleic acid scaffold modification
  modified_base 20: mod_base = OTHER; note = misc_feature - bicyclic nucleic acid scaffold modification
  source 1..20: mol_type = other RNA
gcttcccaatttttcctgta

SEQ ID NO: 3665 - RNA, 20 nt, synthetic construct
  misc_feature 1..20: note = Antisense oligonucleotide
  modified_base 1: mod_base = OTHER; note = misc_feature - bicyclic nucleic acid scaffold modification
  modified_base 18: mod_base = OTHER; note = misc_feature - bicyclic nucleic acid scaffold modification
  modified_base 20: mod_base = OTHER; note = misc_feature - bicyclic nucleic acid scaffold modification
  source 1..20: mol_type = other RNA
gcttcccaatttttcctgta

SEQ ID NO: 3666 - RNA, 20 nt, synthetic construct
  misc_feature 1..20: note = Antisense oligonucleotide
  modified_base 1: mod_base = OTHER; note = misc_feature - bicyclic nucleic acid scaffold modification
  modified_base 16: mod_base = OTHER; note = misc_feature - bicyclic nucleic acid scaffold modification
  modified_base 20: mod_base = OTHER; note = misc_feature - bicyclic nucleic acid scaffold modification
  source 1..20: mol_type = other RNA
gcttcccaatttttcctgta

SEQ ID NO: 3667 - RNA, 20 nt, synthetic construct
  misc_feature 1..20: note = Antisense oligonucleotide
  modified_base 1: mod_base = OTHER; note = misc_feature - bicyclic nucleic acid scaffold modification
  modified_base 15: mod_base = OTHER; note = misc_feature - bicyclic nucleic acid scaffold modification
  modified_base 20: mod_base = OTHER; note = misc_feature - bicyclic nucleic acid scaffold modification
  source 1..20: mol_type = other RNA
gcttcccaatttttcctgta

SEQ ID NO: 3668 - RNA, 20 nt, synthetic construct
  misc_feature 1..20: note = Antisense oligonucleotide
  modified_base 1: mod_base = OTHER; note = misc_feature - bicyclic nucleic acid scaffold modification
  modified_base 7: mod_base = OTHER; note = misc_feature - bicyclic nucleic acid scaffold modification
  modified_base 20: mod_base = OTHER; note = misc_feature - bicyclic nucleic acid scaffold modification
  source 1..20: mol_type = other RNA
gcttcccaatttttcctgta

SEQ ID NO: 3669 - RNA, 20 nt, synthetic construct
  misc_feature 1..20: note = Antisense oligonucleotide
  modified_base 1: mod_base = OTHER; note = misc_feature - bicyclic nucleic acid scaffold modification
  modified_base 5: mod_base = OTHER; note = misc_feature - bicyclic nucleic acid scaffold modification
  modified_base 20: mod_base = OTHER; note = misc_feature - bicyclic nucleic acid scaffold modification
  source 1..20: mol_type = other RNA
gcttcccaatttttcctgta

SEQ ID NO: 3670 - RNA, 20 nt, synthetic construct
  misc_feature 1..20: note = Antisense oligonucleotide
  modified_base 1..2: mod_base = OTHER; note = misc_feature - bicyclic nucleic acid scaffold modification
  modified_base 20: mod_base = OTHER; note = misc_feature - bicyclic nucleic acid scaffold modification
  source 1..20: mol_type = other RNA
gcttcccaatttttcctgta

SEQ ID NO: 3671 - RNA, 20 nt, synthetic construct
  misc_feature 1..20: note = Antisense oligonucleotide
  modified_base 1..2: mod_base = OTHER; note = misc_feature - bicyclic nucleic acid scaffold modification
  modified_base 7: mod_base = OTHER; note = misc_feature - bicyclic nucleic acid scaffold modification
  modified_base 16: mod_base = OTHER; note = misc_feature - bicyclic nucleic acid scaffold modification
  modified_base 20: mod_base = OTHER; note = misc_feature - bicyclic nucleic acid scaffold modification
  source 1..20: mol_type = other RNA
gcttcccaatttttcctgta

SEQ ID NO: 3672 - RNA, 20 nt, synthetic construct
  misc_feature 1..20: note = Antisense oligonucleotide
  modified_base 1: mod_base = OTHER; note = misc_feature - bicyclic nucleic acid scaffold modification
  modified_base 5: mod_base = OTHER; note = misc_feature - bicyclic nucleic acid scaffold modification
  modified_base 15: mod_base = OTHER; note = misc_feature - bicyclic nucleic acid scaffold modification
  modified_base 20: mod_base = OTHER; note = misc_feature - bicyclic nucleic acid scaffold modification
  source 1..20: mol_type = other RNA
gcttcccaatttttcctgta

SEQ ID NO: 3673 - RNA, 20 nt, synthetic construct
  modified_base 19: mod_base = OTHER; note = thymine
  misc_feature 1..20: note = Antisense oligonucleotide
  modified_base 1..2: mod_base = OTHER; note = misc_feature - bicyclic nucleic acid scaffold modification
  modified_base 19..20: mod_base = OTHER; note = misc_feature - bicyclic nucleic acid scaffold modification
  source 1..20: mol_type = other RNA
gcttcccaatttttcctgta

SEQ ID NO: 3674 - RNA, 20 nt, synthetic construct
  modified_base 19: mod_base = OTHER; note = thymine
  misc_feature 1..20: note = Antisense oligonucleotide
  modified_base 1..2: mod_base = OTHER; note = misc_feature - bicyclic nucleic acid scaffold modification
  modified_base 7: mod_base = OTHER; note = misc_feature - bicyclic nucleic acid scaffold modification
  modified_base 15: mod_base = OTHER; note = misc_feature - bicyclic nucleic acid scaffold modification
  modified_base 19..20: mod_base = OTHER; note = misc_feature - bicyclic nucleic acid scaffold modification
  source 1..20: mol_type = other RNA
gcttcccaatttttcctgta

SEQ ID NO: 3675 - RNA, 20 nt, synthetic construct
  misc_feature 1..20: note = Antisense oligonucleotide
  modified_base 1: mod_base = OTHER; note = misc_feature - bicyclic nucleic acid scaffold modification
  modified_base 20: mod_base = OTHER; note = misc_feature - bicyclic nucleic acid scaffold modification
  source 1..20: mol_type = other RNA
cttcccaatttttcctgtag

SEQ ID NO: 3676 - RNA, 20 nt, synthetic construct
  misc_feature 1..20: note = Antisense oligonucleotide
  modified_base 1: mod_base = OTHER; note = misc_feature - bicyclic nucleic acid scaffold modification
  modified_base 20: mod_base = OTHER; note = misc_feature - bicyclic nucleic acid scaffold modification
  source 1..20: mol_type = other RNA
cttcccaatttttcctgtag

SEQ ID NO: 3677 - RNA, 20 nt, synthetic construct
  misc_feature 1..20: note = Antisense oligonucleotide
  modified_base 1: mod_base = OTHER; note = misc_feature - bicyclic nucleic acid scaffold modification
  modified_base 17: mod_base = OTHER; note = misc_feature - bicyclic nucleic acid scaffold modification
  modified_base 20: mod_base = OTHER; note = misc_feature - bicyclic nucleic acid scaffold modification
  source 1..20: mol_type = other RNA
cttcccaatttttcctgtag

SEQ ID NO: 3678 - RNA, 20 nt, synthetic construct
  misc_feature 1..20: note = Antisense oligonucleotide
  modified_base 1: mod_base = OTHER; note = misc_feature - bicyclic nucleic acid scaffold modification
  modified_base 15: mod_base = OTHER; note = misc_feature - bicyclic nucleic acid scaffold modification
  modified_base 20: mod_base = OTHER; note = misc_feature - bicyclic nucleic acid scaffold modification
  source 1..20: mol_type = other RNA
cttcccaatttttcctgtag

SEQ ID NO: 3679 - RNA, 20 nt, synthetic construct
  misc_feature 1..20: note = Antisense oligonucleotide
  modified_base 1: mod_base = OTHER; note = misc_feature - bicyclic nucleic acid scaffold modification
  modified_base 6: mod_base = OTHER; note = misc_feature - bicyclic nucleic acid scaffold modification
  modified_base 20: mod_base = OTHER; note = misc_feature - bicyclic nucleic acid scaffold modification
  source 1..20: mol_type = other RNA
cttcccaatttttcctgtag

SEQ ID NO: 3680 - RNA, 20 nt, synthetic construct
  misc_feature 1..20: note = Antisense oligonucleotide
  modified_base 1: mod_base = OTHER; note = misc_feature - bicyclic nucleic acid scaffold modification
  modified_base 4: mod_base = OTHER; note = misc_feature - bicyclic nucleic acid scaffold modification
  modified_base 20: mod_base = OTHER; note = misc_feature - bicyclic nucleic acid scaffold modification
  source 1..20: mol_type = other RNA
cttcccaatttttcctgtag

SEQ ID NO: 3681 - RNA, 20 nt, synthetic construct
  misc_feature 1..20: note = Antisense oligonucleotide
  modified_base 1: mod_base = OTHER; note = misc_feature - bicyclic nucleic acid scaffold modification
  modified_base 14: mod_base = OTHER; note = misc_feature - bicyclic nucleic acid scaffold modification
  modified_base 20: mod_base = OTHER; note = misc_feature - bicyclic nucleic acid scaffold modification
  source 1..20: mol_type = other RNA
cttcccaatttttcctgtag

SEQ ID NO: 3682 - RNA, 20 nt, synthetic construct
  misc_feature 1..20: note = Antisense oligonucleotide
  modified_base 1: mod_base = OTHER; note = misc_feature - bicyclic nucleic acid scaffold modification
  modified_base 4: mod_base = OTHER; note = misc_feature - bicyclic nucleic acid scaffold modification
  modified_base 14: mod_base = OTHER; note = misc_feature - bicyclic nucleic acid scaffold modification
  modified_base 20: mod_base = OTHER; note = misc_feature - bicyclic nucleic acid scaffold modification
  source 1..20: mol_type = other RNA
cttcccaatttttcctgtag

SEQ ID NO: 3683 - RNA, 20 nt, synthetic construct
  misc_feature 1..20: note = Antisense oligonucleotide
  modified_base 1: mod_base = OTHER; note = misc_feature - bicyclic nucleic acid scaffold modification
  modified_base 6: mod_base = OTHER; note = misc_feature - bicyclic nucleic acid scaffold modification
  modified_base 15: mod_base = OTHER; note = misc_feature - bicyclic nucleic acid scaffold modification
  modified_base 20: mod_base = OTHER; note = misc_feature - bicyclic nucleic acid scaffold modification
  source 1..20: mol_type = other RNA
cttcccaatttttcctgtag

SEQ ID NO: 3684 - RNA, 20 nt, synthetic construct
  misc_feature 1..20: note = Antisense oligonucleotide
  modified_base 1: mod_base = OTHER; note = misc_feature - bicyclic nucleic acid scaffold modification
  modified_base 6: mod_base = OTHER; note = misc_feature - bicyclic nucleic acid scaffold modification
  modified_base 17: mod_base = OTHER; note = misc_feature - bicyclic nucleic acid scaffold modification
  modified_base 20: mod_base = OTHER; note = misc_feature - bicyclic nucleic acid scaffold modification
  source 1..20: mol_type = other RNA
cttcccaatttttcctgtag

SEQ ID NO: 3685 - RNA, 20 nt, synthetic construct
  modified_base 2: mod_base = OTHER; note = thymine
  misc_feature 1..20: note = Antisense oligonucleotide
  modified_base 1..2: mod_base = OTHER; note = misc_feature - bicyclic nucleic acid scaffold modification
  modified_base 19..20: mod_base = OTHER; note = misc_feature - bicyclic nucleic acid scaffold modification
  source 1..20: mol_type = other RNA
cttcccaatttttcctgtag

SEQ ID NO: 3686 - RNA, 20 nt, synthetic construct
  modified_base 2: mod_base = OTHER; note = thymine
  misc_feature 1..20: note = Antisense oligonucleotide
  modified_base 1..2: mod_base = OTHER; note = misc_feature - bicyclic nucleic acid scaffold modification
  modified_base 6: mod_base = OTHER; note = misc_feature - bicyclic nucleic acid scaffold modification
  modified_base 14: mod_base = OTHER; note = misc_feature - bicyclic nucleic acid scaffold modification
  modified_base 19..20: mod_base = OTHER; note = misc_feature - bicyclic nucleic acid scaffold modification
  source 1..20: mol_type = other RNA
cttcccaatttttcctgtag

SEQ ID NO: 3687 - RNA, 18 nt, synthetic construct
  misc_feature 1..18: note = Antisense oligonucleotide
  modified_base 1: mod_base = OTHER; note = misc_feature - bicyclic nucleic acid scaffold modification
  modified_base 18: mod_base = OTHER; note = misc_feature - bicyclic nucleic acid scaffold modification
  source 1..18: mol_type = other RNA
caggcttcccaatttttc

SEQ ID NO: 3688 - RNA, 18 nt, synthetic construct
  misc_feature 1..18: note = Antisense oligonucleotide
  modified_base 1: mod_base = OTHER; note = misc_feature - bicyclic nucleic acid scaffold modification
  modified_base 3: mod_base = OTHER; note = misc_feature - bicyclic nucleic acid scaffold modification
  modified_base 18: mod_base = OTHER; note = misc_feature - bicyclic nucleic acid scaffold modification
  source 1..18: mol_type = other RNA
caggcttcccaatttttc

SEQ ID NO: 3689 - RNA, 18 nt, synthetic construct
  misc_feature 1..18: note = Antisense oligonucleotide
  modified_base 1: mod_base = OTHER; note = misc_feature - bicyclic nucleic acid scaffold modification
  modified_base 4: mod_base = OTHER; note = misc_feature - bicyclic nucleic acid scaffold modification
  modified_base 18: mod_base = OTHER; note = misc_feature - bicyclic nucleic acid scaffold modification
  source 1..18: mol_type = other RNA
caggcttcccaatttttc

SEQ ID NO: 3690 - RNA, 18 nt, synthetic construct
  misc_feature 1..18: note = Antisense oligonucleotide
  modified_base 1: mod_base = OTHER; note = misc_feature - bicyclic nucleic acid scaffold modification
  modified_base 5: mod_base = OTHER; note = misc_feature - bicyclic nucleic acid scaffold modification
  modified_base 18: mod_base = OTHER; note = misc_feature - bicyclic nucleic acid scaffold modification
  source 1..18: mol_type = other RNA
caggcttcccaatttttc

SEQ ID NO: 3691 - RNA, 18 nt, synthetic construct
  misc_feature 1..18: note = Antisense oligonucleotide
  modified_base 1: mod_base = OTHER; note = misc_feature - bicyclic nucleic acid scaffold modification
  modified_base 8: mod_base = OTHER; note = misc_feature - bicyclic nucleic acid scaffold modification
  modified_base 18: mod_base = OTHER; note = misc_feature - bicyclic nucleic acid scaffold modification
  source 1..18: mol_type = other RNA
caggcttcccaatttttc

SEQ ID NO: 3692 - RNA, 18 nt, synthetic construct
  misc_feature 1..18: note = Antisense oligonucleotide
  modified_base 1: mod_base = OTHER; note = misc_feature - bicyclic nucleic acid scaffold modification
  modified_base 10: mod_base = OTHER; note = misc_feature - bicyclic nucleic acid scaffold modification
  modified_base 18: mod_base = OTHER; note = misc_feature - bicyclic nucleic acid scaffold modification
  source 1..18: mol_type = other RNA
caggcttcccaatttttc

SEQ ID NO: 3693 - RNA, 18 nt, synthetic construct
  misc_feature 1..18: note = Antisense oligonucleotide
  modified_base 1: mod_base = OTHER; note = misc_feature - bicyclic nucleic acid scaffold modification
  modified_base 5: mod_base = OTHER; note = misc_feature - bicyclic nucleic acid scaffold modification
  modified_base 10: mod_base = OTHER; note = misc_feature - bicyclic nucleic acid scaffold modification
  modified_base 18: mod_base = OTHER; note = misc_feature - bicyclic nucleic acid scaffold modification
  source 1..18: mol_type = other RNA
caggcttcccaatttttc

SEQ ID NO: 3694 - RNA, 18 nt, synthetic construct
  misc_feature 1..18: note = Antisense oligonucleotide
  modified_base 1: mod_base = OTHER; note = misc_feature - bicyclic nucleic acid scaffold modification
  modified_base 3: mod_base = OTHER; note = misc_feature - bicyclic nucleic acid scaffold modification
  modified_base 8: mod_base = OTHER; note = misc_feature - bicyclic nucleic acid scaffold modification
  modified_base 18: mod_base = OTHER; note = misc_feature - bicyclic nucleic acid scaffold modification
  source 1..18: mol_type = other RNA
caggcttcccaatttttc

SEQ ID NO: 3695 - RNA, 18 nt, synthetic construct
  modified_base 17: mod_base = OTHER; note = thymine
  misc_feature 1..18: note = Antisense oligonucleotide
  modified_base 1..2: mod_base = OTHER; note = misc_feature - bicyclic nucleic acid scaffold modification
  modified_base 17..18: mod_base = OTHER; note = misc_feature - bicyclic nucleic acid scaffold modification
  source 1..18: mol_type = other RNA
caggcttcccaatttttc

SEQ ID NO: 3696 - RNA, 18 nt, synthetic construct
  modified_base 17: mod_base = OTHER; note = thymine
  misc_feature 1..18: note = Antisense oligonucleotide
  modified_base 1..2: mod_base = OTHER; note = misc_feature - bicyclic nucleic acid scaffold modification
  modified_base 10: mod_base = OTHER; note = misc_feature - bicyclic nucleic acid scaffold modification
  modified_base 17..18: mod_base = OTHER; note = misc_feature - bicyclic nucleic acid scaffold modification
  source 1..18: mol_type = other RNA
caggcttcccaatttttc

SEQ ID NO: 3697 - RNA, 18 nt, synthetic construct
  modified_base 17: mod_base = OTHER; note = thymine
  misc_feature 1..18: note = Antisense oligonucleotide
  modified_base 1..2: mod_base = OTHER; note = misc_feature - bicyclic nucleic acid scaffold modification
  modified_base 8: mod_base = OTHER; note = misc_feature - bicyclic nucleic acid scaffold modification
  modified_base 17..18: mod_base = OTHER; note = misc_feature - bicyclic nucleic acid scaffold modification
  source 1..18: mol_type = other RNA
caggcttcccaatttttc

SEQ ID NO: 3698 - RNA, 18 nt, synthetic construct
  misc_feature 1..18: note = Antisense oligonucleotide
  modified_base 1: mod_base = OTHER; note = misc_feature - bicyclic nucleic acid scaffold modification
  modified_base 18: mod_base = OTHER; note = misc_feature - bicyclic nucleic acid scaffold modification
  source 1..18: mol_type = other RNA
aggcttcccaatttttcc

SEQ ID NO: 3699 - RNA, 18 nt, synthetic construct
  misc_feature 1..18: note = Antisense oligonucleotide
  modified_base 1..2: mod_base = OTHER; note = misc_feature - bicyclic nucleic acid scaffold modification
  modified_base 18: mod_base = OTHER; note = misc_feature - bicyclic nucleic acid scaffold modification
  source 1..18: mol_type = other RNA
aggcttcccaatttttcc

SEQ ID NO: 3700 - RNA, 18 nt, synthetic construct
  misc_feature 1..18: note = Antisense oligonucleotide
  modified_base 1: mod_base = OTHER; note = misc_feature - bicyclic nucleic acid scaffold modification
  modified_base 3: mod_base = OTHER; note = misc_feature - bicyclic nucleic acid scaffold modification
  modified_base 18: mod_base = OTHER; note = misc_feature - bicyclic nucleic acid scaffold modification
  source 1..18: mol_type = other RNA
aggcttcccaatttttcc

SEQ ID NO: 3701 - RNA, 18 nt, synthetic construct
  misc_feature 1..18: note = Antisense oligonucleotide
  modified_base 1: mod_base = OTHER; note = misc_feature - bicyclic nucleic acid scaffold modification
  modified_base 4: mod_base = OTHER; note = misc_feature - bicyclic nucleic acid scaffold modification
  modified_base 18: mod_base = OTHER; note = misc_feature - bicyclic nucleic acid scaffold modification
  source 1..18: mol_type = other RNA
aggcttcccaatttttcc

SEQ ID NO: 3702 - RNA, 18 nt, synthetic construct
  misc_feature 1..18: note = Antisense oligonucleotide
  modified_base 1: mod_base = OTHER; note = misc_feature - bicyclic nucleic acid scaffold modification
  modified_base 7: mod_base = OTHER; note = misc_feature - bicyclic nucleic acid scaffold modification
  modified_base 18: mod_base = OTHER; note = misc_feature - bicyclic nucleic acid scaffold modification
  source 1..18: mol_type = other RNA
aggcttcccaatttttcc

SEQ ID NO: 3703 - RNA, 18 nt, synthetic construct
  misc_feature 1..18: note = Antisense oligonucleotide
  modified_base 1: mod_base = OTHER; note = misc_feature - bicyclic nucleic acid scaffold modification
  modified_base 9: mod_base = OTHER; note = misc_feature - bicyclic nucleic acid scaffold modification
  modified_base 18: mod_base = OTHER; note = misc_feature - bicyclic nucleic acid scaffold modification
  source 1..18: mol_type = other RNA
aggcttcccaatttttcc

SEQ ID NO: 3704 - RNA, 18 nt, synthetic construct
  misc_feature 1..18: note = Antisense oligonucleotide
  modified_base 1: mod_base = OTHER; note = misc_feature - bicyclic nucleic acid scaffold modification
  modified_base 17..18: mod_base = OTHER; note = misc_feature - bicyclic nucleic acid scaffold modification
  source 1..18: mol_type = other RNA
aggcttcccaatttttcc

SEQ ID NO: 3705 - RNA, 18 nt, synthetic construct
  misc_feature 1..18: note = Antisense oligonucleotide
  modified_base 1: mod_base = OTHER; note = misc_feature - bicyclic nucleic acid scaffold modification
  modified_base 4: mod_base = OTHER; note = misc_feature - bicyclic nucleic acid scaffold modification
  modified_base 9: mod_base = OTHER; note = misc_feature - bicyclic nucleic acid scaffold modification
  modified_base 18: mod_base = OTHER; note = misc_feature - bicyclic nucleic acid scaffold modification
  source 1..18: mol_type = other RNA
aggcttcccaatttttcc

SEQ ID NO: 3706 - RNA, 18 nt, synthetic construct
  misc_feature 1..18: note = Antisense oligonucleotide
  modified_base 1..2: mod_base = OTHER; note = misc_feature - bicyclic nucleic acid scaffold modification
  modified_base 7: mod_base = OTHER; note = misc_feature - bicyclic nucleic acid scaffold modification
  modified_base 18: mod_base = OTHER; note = misc_feature - bicyclic nucleic acid scaffold modification
  source 1..18: mol_type = other RNA
aggcttcccaatttttcc

SEQ ID NO: 3707 - RNA, 18 nt, synthetic construct
  misc_feature 1..18: note = Antisense oligonucleotide
  modified_base 1..2: mod_base = OTHER; note = misc_feature - bicyclic nucleic acid scaffold modification
  modified_base 17..18: mod_base = OTHER; note = misc_feature - bicyclic nucleic acid scaffold modification
  source 1..18: mol_type = other RNA
aggcttcccaatttttcc

SEQ ID NO: 3708 - RNA, 18 nt, synthetic construct
  misc_feature 1..18: note = Antisense oligonucleotide
  modified_base 1..2: mod_base = OTHER; note = misc_feature - bicyclic nucleic acid scaffold modification
  modified_base 9: mod_base = OTHER; note = misc_feature - bicyclic nucleic acid scaffold modification
  modified_base 17..18: mod_base = OTHER; note = misc_feature - bicyclic nucleic acid scaffold modification
  source 1..18: mol_type = other RNA
aggcttcccaatttttcc

SEQ ID NO: 3709 - RNA, 18 nt, synthetic construct
  modified_base 18: mod_base = OTHER; note = thymine
  misc_feature 1..18: note = Antisense oligonucleotide
  modified_base 1: mod_base = OTHER; note = misc_feature - bicyclic nucleic acid scaffold modification
  modified_base 18: mod_base = OTHER; note = misc_feature - bicyclic nucleic acid scaffold modification
  source 1..18: mol_type = other RNA
ggcttcccaatttttcct

SEQ ID NO: 3710 - RNA, 18 nt, synthetic construct
  modified_base 18: mod_base = OTHER; note = thymine
  misc_feature 1..18: note = Antisense oligonucleotide
  modified_base 1..2: mod_base = OTHER; note = misc_feature - bicyclic nucleic acid scaffold modification
  modified_base 18: mod_base = OTHER; note = misc_feature - bicyclic nucleic acid scaffold modification
  source 1..18: mol_type = other RNA
ggcttcccaatttttcct

SEQ ID NO: 3711 - RNA, 18 nt, synthetic construct
  modified_base 18: mod_base = OTHER; note = thymine
  misc_feature 1..18: note = Antisense oligonucleotide
  modified_base 1: mod_base = OTHER; note = misc_feature - bicyclic nucleic acid scaffold modification
  modified_base 3: mod_base = OTHER; note = misc_feature - bicyclic nucleic acid scaffold modification
  modified_base 18: mod_base = OTHER; note = misc_feature - bicyclic nucleic acid scaffold modification
  source 1..18: mol_type = other RNA
ggcttcccaatttttcct

SEQ ID NO: 3712 - RNA, 18 nt, synthetic construct
  modified_base 18: mod_base = OTHER; note = thymine
  misc_feature 1..18: note = Antisense oligonucleotide
  modified_base 1: mod_base = OTHER; note = misc_feature - bicyclic nucleic acid scaffold modification
  modified_base 6: mod_base = OTHER; note = misc_feature - bicyclic nucleic acid scaffold modification
  modified_base 18: mod_base = OTHER; note = misc_feature - bicyclic nucleic acid scaffold modification
  source 1..18: mol_type = other RNA
ggcttcccaatttttcct

SEQ ID NO: 3713 - RNA, 18 nt, synthetic construct
  modified_base 18: mod_base = OTHER; note = thymine
  misc_feature 1..18: note = Antisense oligonucleotide
  modified_base 1: mod_base = OTHER; note = misc_feature - bicyclic nucleic acid scaffold modification
  modified_base 8: mod_base = OTHER; note = misc_feature - bicyclic nucleic acid scaffold modification
  modified_base 18: mod_base = OTHER; note = misc_feature - bicyclic nucleic acid scaffold modification
  source 1..18: mol_type = other RNA
ggcttcccaatttttcct

SEQ ID NO: 3714 - RNA, 18 nt, synthetic construct
  modified_base 18: mod_base = OTHER; note = thymine
  misc_feature 1..18: note = Antisense oligonucleotide
  modified_base 1: mod_base = OTHER; note = misc_feature - bicyclic nucleic acid scaffold modification
  modified_base 16: mod_base = OTHER; note = misc_feature - bicyclic nucleic acid scaffold modification
  modified_base 18: mod_base = OTHER; note = misc_feature - bicyclic nucleic acid scaffold modification
  source 1..18: mol_type = other RNA
ggcttcccaatttttcct

SEQ ID NO: 3715 - RNA, 18 nt, synthetic construct
  modified_base 18: mod_base = OTHER; note = thymine
  misc_feature 1..18: note = Antisense oligonucleotide
  modified_base 1: mod_base = OTHER; note = misc_feature - bicyclic nucleic acid scaffold modification
  modified_base 6: mod_base = OTHER; note = misc_feature - bicyclic nucleic acid scaffold modification
  modified_base 16: mod_base = OTHER; note = misc_feature - bicyclic nucleic acid scaffold modification
  modified_base 18: mod_base = OTHER; note = misc_feature - bicyclic nucleic acid scaffold modification
  source 1..18: mol_type = other RNA
ggcttcccaatttttcct

SEQ ID NO: 3716 - RNA, 18 nt, synthetic construct
  modified_base 18: mod_base = OTHER; note = thymine
  misc_feature 1..18: note = Antisense oligonucleotide
  modified_base 1: mod_base = OTHER; note = misc_feature - bicyclic nucleic acid scaffold modification
  modified_base 3: mod_base = OTHER; note = misc_feature - bicyclic nucleic acid scaffold modification
  modified_base 8: mod_base = OTHER; note = misc_feature - bicyclic nucleic acid scaffold modification
  modified_base 18: mod_base = OTHER; note = misc_feature - bicyclic nucleic acid scaffold modification
  source 1..18: mol_type = other RNA
ggcttcccaatttttcct

SEQ ID NO: 3717 - RNA, 18 nt, synthetic construct
  modified_base 18: mod_base = OTHER; note = thymine
  misc_feature 1..18: note = Antisense oligonucleotide
  modified_base 1: mod_base = OTHER; note = misc_feature - bicyclic nucleic acid scaffold modification
  modified_base 8: mod_base = OTHER; note = misc_feature - bicyclic nucleic acid scaffold modification
  modified_base 17..18: mod_base = OTHER; note = misc_feature - bicyclic nucleic acid scaffold modification
  source 1..18: mol_type = other RNA
ggcttcccaatttttcct

SEQ ID NO: 3718 - RNA, 18 nt, synthetic construct
  modified_base 18: mod_base = OTHER; note = thymine
  misc_feature 1..18: note = Antisense oligonucleotide
  modified_base 1..2: mod_base = OTHER; note = misc_feature - bicyclic nucleic acid scaffold modification
  modified_base 8: mod_base = OTHER; note = misc_feature - bicyclic nucleic acid scaffold modification
  modified_base 18: mod_base = OTHER; note = misc_feature - bicyclic nucleic acid scaffold modification
  source 1..18: mol_type = other RNA
ggcttcccaatttttcct

SEQ ID NO: 3719 - RNA, 18 nt, synthetic construct
  modified_base 18: mod_base = OTHER; note = thymine
  misc_feature 1..18: note = Antisense oligonucleotide
  modified_base 1..2: mod_base = OTHER; note = misc_feature - bicyclic nucleic acid scaffold modification
  modified_base 17..18: mod_base = OTHER; note = misc_feature - bicyclic nucleic acid scaffold modification
  source 1..18: mol_type = other RNA
ggcttcccaatttttcct

SEQ ID NO: 3720 - RNA, 18 nt, synthetic construct
  misc_feature 1..18: note = Antisense oligonucleotide
  modified_base 1: mod_base = OTHER; note = misc_feature - bicyclic nucleic acid scaffold modification
  modified_base 18: mod_base = OTHER; note = misc_feature - bicyclic nucleic acid scaffold modification
  source 1..18: mol_type = other RNA
gcttcccaatttttcctg

SEQ ID NO: 3721 - RNA, 18 nt, synthetic construct
  misc_feature 1..18: note = Antisense oligonucleotide
  modified_base 1..2: mod_base = OTHER; note = misc_feature - bicyclic nucleic acid scaffold modification
  modified_base 18: mod_base = OTHER; note = misc_feature - bicyclic nucleic acid scaffold modification
  source 1..18: mol_type = other RNA
gcttcccaatttttcctg

SEQ ID NO: 3722 - RNA, 18 nt, synthetic construct
  misc_feature 1..18: note = Antisense oligonucleotide
  modified_base 1: mod_base = OTHER; note = misc_feature - bicyclic nucleic acid scaffold modification
  modified_base 5: mod_base = OTHER; note = misc_feature - bicyclic nucleic acid scaffold modification
  modified_base 18: mod_base = OTHER; note = misc_feature - bicyclic nucleic acid scaffold modification
  source 1..18: mol_type = other RNA
gcttcccaatttttcctg

SEQ ID NO: 3723 - RNA, 18 nt, synthetic construct
  misc_feature 1..18: note = Antisense oligonucleotide
  modified_base 1: mod_base = OTHER; note = misc_feature - bicyclic nucleic acid scaffold modification
  modified_base 7: mod_base = OTHER; note = misc_feature - bicyclic nucleic acid scaffold modification
  modified_base 18: mod_base = OTHER; note = misc_feature - bicyclic nucleic acid scaffold modification
  source 1..18: mol_type = other RNA
gcttcccaatttttcctg

SEQ ID NO: 3724 - RNA, 18 nt, synthetic construct
  misc_feature 1..18: note = Antisense oligonucleotide
  modified_base 1: mod_base = OTHER; note = misc_feature - bicyclic nucleic acid scaffold modification
  modified_base 15: mod_base = OTHER; note = misc_feature - bicyclic nucleic acid scaffold modification
  modified_base 18: mod_base = OTHER; note = misc_feature - bicyclic nucleic acid scaffold modification
  source 1..18: mol_type = other RNA
gcttcccaatttttcctg

SEQ ID NO: 3725 - RNA, 18 nt, synthetic construct
  misc_feature 1..18: note = Antisense oligonucleotide
  modified_base 1: mod_base = OTHER; note = misc_feature - bicyclic nucleic acid scaffold modification
  modified_base 16: mod_base = OTHER; note = misc_feature - bicyclic nucleic acid scaffold modification
  modified_base 18: mod_base = OTHER; note = misc_feature - bicyclic nucleic acid scaffold modification
  source 1..18: mol_type = other RNA
gcttcccaatttttcctg

SEQ ID NO: 3726 - RNA, 18 nt, synthetic construct
  misc_feature 1..18: note = Antisense oligonucleotide
  modified_base 1: mod_base = OTHER; note = misc_feature - bicyclic nucleic acid scaffold modification
  modified_base 6: mod_base = OTHER; note = misc_feature - bicyclic nucleic acid scaffold modification
  modified_base 18: mod_base = OTHER; note = misc_feature - bicyclic nucleic acid scaffold modification
  source 1..18: mol_type = other RNA
gcttcccaatttttcctg

SEQ ID NO: 3727 - RNA, 18 nt, synthetic construct
  misc_feature 1..18: note = Antisense oligonucleotide
  modified_base 1: mod_base = OTHER; note = misc_feature - bicyclic nucleic acid scaffold modification
  modified_base 5: mod_base = OTHER; note = misc_feature - bicyclic nucleic acid scaffold modification
  modified_base 15: mod_base = OTHER; note = misc_feature - bicyclic nucleic acid scaffold modification
  modified_base 18: mod_base = OTHER; note = misc_feature - bicyclic nucleic acid scaffold modification
  source 1..18: mol_type = other RNA
gcttcccaatttttcctg

SEQ ID NO: 3728 - RNA, 18 nt, synthetic construct
  misc_feature 1..18: note = Antisense oligonucleotide
  modified_base 1: mod_base = OTHER; note = misc_feature - bicyclic nucleic acid scaffold modification
  modified_base 7: mod_base = OTHER; note = misc_feature - bicyclic nucleic acid scaffold modification
  modified_base 16: mod_base = OTHER; note = misc_feature - bicyclic nucleic acid scaffold modification
  modified_base 18: mod_base = OTHER; note = misc_feature - bicyclic nucleic acid scaffold modification
  source 1..18: mol_type = other RNA
gcttcccaatttttcctg

SEQ ID NO: 3729 - RNA, 18 nt, synthetic construct
  modified_base 17: mod_base = OTHER; note = thymine
  misc_feature 1..18: note = Antisense oligonucleotide
  modified_base 1..2: mod_base = OTHER; note = misc_feature - bicyclic nucleic acid scaffold modification
  modified_base 17..18: mod_base = OTHER; note = misc_feature - bicyclic nucleic acid scaffold modification
  source 1..18: mol_type = other RNA
gcttcccaatttttcctg

SEQ ID NO: 3730 - RNA, 18 nt, synthetic construct
  modified_base 17: mod_base = OTHER; note = thymine
  misc_feature 1..18: note = Antisense oligonucleotide
  modified_base 1..2: mod_base = OTHER; note = misc_feature - bicyclic nucleic acid scaffold modification
  modified_base 7: mod_base = OTHER; note = misc_feature - bicyclic nucleic acid scaffold modification
  modified_base 15: mod_base = OTHER; note = misc_feature - bicyclic nucleic acid scaffold modification
  modified_base 17..18: mod_base = OTHER; note = misc_feature - bicyclic nucleic acid scaffold modification
  source 1..18: mol_type = other RNA
gcttcccaatttttcctg

SEQ ID NO: 3731 - RNA, 18 nt, synthetic construct
  modified_base 18: mod_base = OTHER; note = thymine
  misc_feature 1..18: note = Antisense oligonucleotide
  modified_base 1: mod_base = OTHER; note = misc_feature - bicyclic nucleic acid scaffold modification
  modified_base 18: mod_base = OTHER; note = misc_feature - bicyclic nucleic acid scaffold modification
  source 1..18: mol_type = other RNA
cttcccaatttttcctgt

SEQ ID NO: 3732 - RNA, 18 nt, synthetic construct
  modified_base 18: mod_base = OTHER; note = thymine
  misc_feature 1..18: note = Antisense oligonucleotide
  modified_base 1: mod_base = OTHER; note = misc_feature - bicyclic nucleic acid scaffold modification
  modified_base 4: mod_base = OTHER; note = misc_feature - bicyclic nucleic acid scaffold modification
  modified_base 18: mod_base = OTHER; note = misc_feature - bicyclic nucleic acid scaffold modification
  source 1..18: mol_type = other RNA
cttcccaatttttcctgt

SEQ ID NO: 3733 - RNA, 18 nt, synthetic construct
  modified_base 18: mod_base = OTHER; note = thymine
  misc_feature 1..18: note = Antisense oligonucleotide
  modified_base 1: mod_base = OTHER; note = misc_feature - bicyclic nucleic acid scaffold modification
  modified_base 5: mod_base = OTHER; note = misc_feature - bicyclic nucleic acid scaffold modification
  modified_base 18: mod_base = OTHER; note = misc_feature - bicyclic nucleic acid scaffold modification
  source 1..18: mol_type = other RNA
cttcccaatttttcctgt

SEQ ID NO: 3734 - RNA, 18 nt, synthetic construct
  modified_base 18: mod_base = OTHER; note = thymine
  misc_feature 1..18: note = Antisense oligonucleotide
  modified_base 1: mod_base = OTHER; note = misc_feature - bicyclic nucleic acid scaffold modification
  modified_base 6: mod_base = OTHER; note = misc_feature - bicyclic nucleic acid scaffold modification
  modified_base 18: mod_base = OTHER; note = misc_feature - bicyclic nucleic acid scaffold modification
  source 1..18: mol_type = other RNA
cttcccaatttttcctgt

SEQ ID NO: 3735 - RNA, 18 nt, synthetic construct
  modified_base 18: mod_base = OTHER; note = thymine
  misc_feature 1..18: note = Antisense oligonucleotide
  modified_base 1: mod_base = OTHER; note = misc_feature - bicyclic nucleic acid scaffold modification
  modified_base 14: mod_base = OTHER; note = misc_feature - bicyclic nucleic acid scaffold modification
  modified_base 18: mod_base = OTHER; note = misc_feature - bicyclic nucleic acid scaffold modification
  source 1..18: mol_type = other RNA
cttcccaatttttcctgt

SEQ ID NO: 3736 - RNA, 18 nt, synthetic construct
  modified_base 18: mod_base = OTHER; note = thymine
  misc_feature 1..18: note = Antisense oligonucleotide
  modified_base 1: mod_base = OTHER; note = misc_feature - bicyclic nucleic acid scaffold modification
  modified_base 15: mod_base = OTHER; note = misc_feature - bicyclic nucleic acid scaffold modification
  modified_base 18: mod_base = OTHER; note = misc_feature - bicyclic nucleic acid scaffold modification
  source 1..18: mol_type = other RNA
cttcccaatttttcctgt

SEQ ID NO: 3737 - RNA, 18 nt, synthetic construct
  modified_base 18: mod_base = OTHER; note = thymine
  misc_feature 1..18: note = Antisense oligonucleotide
  modified_base 1: mod_base = OTHER; note = misc_feature - bicyclic nucleic acid scaffold modification
  modified_base 17..18: mod_base = OTHER; note = misc_feature - bicyclic nucleic acid scaffold modification
  source 1..18: mol_type = other RNA
cttcccaatttttcctgt

SEQ ID NO: 3738 - RNA, 18 nt, synthetic construct
  modified_base 18: mod_base = OTHER; note = thymine
  misc_feature 1..18: note = Antisense oligonucleotide
  modified_base 1: mod_base = OTHER; note = misc_feature - bicyclic nucleic acid scaffold modification
  modified_base 6: mod_base = OTHER; note = misc_feature - bicyclic nucleic acid scaffold modification
  modified_base 15: mod_base = OTHER; note = misc_feature - bicyclic nucleic acid scaffold modification
  modified_base 18: mod_base = OTHER; note = misc_feature - bicyclic nucleic acid scaffold modification
  source 1..18: mol_type = other RNA
cttcccaatttttcctgt

SEQ ID NO: 3739 - RNA, 18 nt, synthetic construct
  modified_base 18: mod_base = OTHER; note = thymine
  misc_feature 1..18: note = Antisense oligonucleotide
  modified_base 1: mod_base = OTHER; note = misc_feature - bicyclic nucleic acid scaffold modification
  modified_base 4: mod_base = OTHER; note = misc_feature - bicyclic nucleic acid scaffold modification
  modified_base 14: mod_base = OTHER; note = misc_feature - bicyclic nucleic acid scaffold modification
  modified_base 18: mod_base = OTHER; note = misc_feature - bicyclic nucleic acid scaffold modification
  source 1..18: mol_type = other RNA
cttcccaatttttcctgt

SEQ ID NO: 3740 - RNA, 18 nt, synthetic construct
  modified_base 2: mod_base = OTHER; note = thymine
  modified_base 18: mod_base = OTHER; note = thymine
  misc_feature 1..18: note = Antisense oligonucleotide
  modified_base 1..2: mod_base = OTHER; note = misc_feature - bicyclic nucleic acid scaffold modification
  modified_base 17..18: mod_base = OTHER; note = misc_feature - bicyclic nucleic acid scaffold modification
  source 1..18: mol_type = other RNA
cttcccaatttttcctgt

SEQ ID NO: 3741 - RNA, 18 nt, synthetic construct
  modified_base 2: mod_base = OTHER; note = thymine
  modified_base 18: mod_base = OTHER; note = thymine
  misc_feature 1..18: note = Antisense oligonucleotide
  modified_base 1..2: mod_base = OTHER; note = misc_feature - bicyclic nucleic acid scaffold modification
  modified_base 6: mod_base = OTHER; note = misc_feature - bicyclic nucleic acid scaffold modification
  modified_base 14: mod_base = OTHER; note = misc_feature - bicyclic nucleic acid scaffold modification
  modified_base 17..18: mod_base = OTHER; note = misc_feature - bicyclic nucleic acid scaffold modification
  source 1..18: mol_type = other RNA
cttcccaatttttcctgt

SEQ ID NO: 3742 - RNA, 18 nt, synthetic construct
  modified_base 1: mod_base = OTHER; note = thymine
  misc_feature 1..18: note = Antisense oligonucleotide
  modified_base 1: mod_base = OTHER; note = misc_feature - bicyclic nucleic acid scaffold modification
  modified_base 18: mod_base = OTHER; note = misc_feature - bicyclic nucleic acid scaffold modification
  source 1..18: mol_type = other RNA
ttcccaatttttcctgta

SEQ ID NO: 3743 - RNA, 18 nt, synthetic construct
  modified_base 1: mod_base = OTHER; note = thymine
  misc_feature 1..18: note = Antisense oligonucleotide
  modified_base 1: mod_base = OTHER; note = misc_feature - bicyclic nucleic acid scaffold modification
  modified_base 3: mod_base = OTHER; note = misc_feature - bicyclic nucleic acid scaffold modification
  modified_base 18: mod_base = OTHER; note = misc_feature - bicyclic nucleic acid scaffold modification
  source 1..18: mol_type = other RNA
ttcccaatttttcctgta

SEQ ID NO: 3744 - RNA, 18 nt, synthetic construct
  modified_base 1: mod_base = OTHER; note = thymine
  misc_feature 1..18: note = Antisense oligonucleotide
  modified_base 1: mod_base = OTHER; note = misc_feature - bicyclic nucleic acid scaffold modification
  modified_base 4: mod_base = OTHER; note = misc_feature - bicyclic nucleic acid scaffold modification
  modified_base 18: mod_base = OTHER; note = misc_feature - bicyclic nucleic acid scaffold modification
  source 1..18: mol_type = other RNA
ttcccaatttttcctgta

SEQ ID NO: 3745 - RNA, 18 nt, synthetic construct
  modified_base 1: mod_base = OTHER; note = thymine
  misc_feature 1..18: note = Antisense oligonucleotide
  modified_base 1: mod_base = OTHER; note = misc_feature - bicyclic nucleic acid scaffold modification
  modified_base 5: mod_base = OTHER; note = misc_feature - bicyclic nucleic acid scaffold modification
  modified_base 18: mod_base = OTHER; note = misc_feature - bicyclic nucleic acid scaffold modification
  source 1..18: mol_type = other RNA
ttcccaatttttcctgta

SEQ ID NO: 3746 - RNA, 18 nt, synthetic construct
  modified_base 1: mod_base = OTHER; note = thymine
  misc_feature 1..18: note = Antisense oligonucleotide
  modified_base 1: mod_base = OTHER; note = misc_feature - bicyclic nucleic acid scaffold modification
  modified_base 13: mod_base = OTHER; note = misc_feature - bicyclic nucleic acid scaffold modification
  modified_base 18: mod_base = OTHER; note = misc_feature - bicyclic nucleic acid scaffold modification
  source 1..18: mol_type = other RNA
ttcccaatttttcctgta

SEQ ID NO: 3747 - RNA, 18 nt, synthetic construct
  modified_base 1: mod_base = OTHER; note = thymine
  misc_feature 1..18: note = Antisense oligonucleotide
  modified_base 1: mod_base = OTHER; note = misc_feature - bicyclic nucleic acid scaffold modification
  modified_base 14: mod_base = OTHER; note = misc_feature - bicyclic nucleic acid scaffold modification
  modified_base 18: mod_base = OTHER; note = misc_feature - bicyclic nucleic acid scaffold modification
  source 1..18: mol_type = other RNA
ttcccaatttttcctgta

SEQ ID NO: 3748 - RNA, 18 nt, synthetic construct
  modified_base 1: mod_base = OTHER; note = thymine
  misc_feature 1..18: note = Antisense oligonucleotide
  modified_base 1: mod_base = OTHER; note = misc_feature - bicyclic nucleic acid scaffold modification
  modified_base 16: mod_base = OTHER; note = misc_feature - bicyclic nucleic acid scaffold modification
  modified_base 18: mod_base = OTHER; note = misc_feature - bicyclic nucleic acid scaffold modification
  source 1..18: mol_type = other RNA
ttcccaatttttcctgta

SEQ ID NO: 3749 - RNA, 18 nt, synthetic construct
  modified_base 1: mod_base = OTHER; note = thymine
  misc_feature 1..18: note = Antisense oligonucleotide
  modified_base 1: mod_base = OTHER; note = misc_feature - bicyclic nucleic acid scaffold modification
  modified_base 3: mod_base = OTHER; note = misc_feature - bicyclic nucleic acid scaffold modification
  modified_base 16: mod_base = OTHER; note = misc_feature - bicyclic nucleic acid scaffold modification
  modified_base 18: mod_base = OTHER; note = misc_feature - bicyclic nucleic acid scaffold modification
  source 1..18: mol_type = other RNA
ttcccaatttttcctgta

SEQ ID NO: 3750 - RNA, 18 nt, synthetic construct
  modified_base 1: mod_base = OTHER; note = thymine
  misc_feature 1..18: note = Antisense oligonucleotide
  modified_base 1: mod_base = OTHER; note = misc_feature - bicyclic nucleic acid scaffold modification
  modified_base 5: mod_base = OTHER; note = misc_feature - bicyclic nucleic acid scaffold modification
  modified_base 14: mod_base = OTHER; note = misc_feature - bicyclic nucleic acid scaffold modification
  modified_base 18: mod_base = OTHER; note = misc_feature - bicyclic nucleic acid scaffold modification
  source 1..18: mol_type = other RNA
ttcccaatttttcctgta

SEQ ID NO: 3751 - RNA, 18 nt, synthetic construct
  modified_base 1..2: mod_base = OTHER; note = thymine
  modified_base 17: mod_base = OTHER; note = thymine
  misc_feature 1..18: note = Antisense oligonucleotide
  modified_base 1..2: mod_base = OTHER; note = misc_feature - bicyclic nucleic acid scaffold modification
  modified_base 17..18: mod_base = OTHER; note = misc_feature - bicyclic nucleic acid scaffold modification
  source 1..18: mol_type = other RNA
ttcccaatttttcctgta

SEQ ID NO: 3752 - RNA, 18 nt, synthetic construct
  modified_base 1..2: mod_base = OTHER; note = thymine
  modified_base 17: mod_base = OTHER; note = thymine
  misc_feature 1..18: note = Antisense oligonucleotide
  modified_base 1..2: mod_base = OTHER; note = misc_feature - bicyclic nucleic acid scaffold modification
  modified_base 5: mod_base = OTHER; note = misc_feature - bicyclic nucleic acid scaffold modification
  modified_base 13: mod_base = OTHER; note = misc_feature - bicyclic nucleic acid scaffold modification
  modified_base 17..18: mod_base = OTHER; note = misc_feature - bicyclic nucleic acid scaffold modification
  source 1..18: mol_type = other RNA
ttcccaatttttcctgta

SEQ ID NO: 3753 - RNA, 18 nt, synthetic construct
  modified_base 1: mod_base = OTHER; note = thymine
  misc_feature 1..18: note = Antisense oligonucleotide
  modified_base 1: mod_base = OTHER; note = misc_feature - bicyclic nucleic acid scaffold modification
  modified_base 18: mod_base = OTHER; note = misc_feature - bicyclic nucleic acid scaffold modification
  source 1..18: mol_type = other RNA
tcccaatttttcctgtag

SEQ ID NO: 3754 - RNA, 18 nt, synthetic construct
  modified_base 1: mod_base = OTHER; note = thymine
  misc_feature 1..18: note = Antisense oligonucleotide
  modified_base 1: mod_base = OTHER; note = misc_feature - bicyclic nucleic acid scaffold modification
  modified_base 15: mod_base = OTHER; note = misc_feature - bicyclic nucleic acid scaffold modification
  modified_base 18: mod_base = OTHER; note = misc_feature - bicyclic nucleic acid scaffold modification
  source 1..18: mol_type = other RNA
tcccaatttttcctgtag

SEQ ID NO: 3755 - RNA, 18 nt, synthetic construct
  modified_base 1: mod_base = OTHER; note = thymine
  misc_feature 1..18: note = Antisense oligonucleotide
  modified_base 1: mod_base = OTHER; note = misc_feature - bicyclic nucleic acid scaffold modification
  modified_base 13: mod_base = OTHER; note = misc_feature - bicyclic nucleic acid scaffold modification
  modified_base 18: mod_base = OTHER; note = misc_feature - bicyclic nucleic acid scaffold modification
  source 1..18: mol_type = other RNA
tcccaatttttcctgtag

SEQ ID NO: 3756 - RNA, 18 nt, synthetic construct
  modified_base 1: mod_base = OTHER; note = thymine
  misc_feature 1..18: note = Antisense oligonucleotide
  modified_base 1: mod_base = OTHER; note = misc_feature - bicyclic nucleic acid scaffold modification
  modified_base 12: mod_base = OTHER; note = misc_feature - bicyclic nucleic acid scaffold modification
  modified_base 18: mod_base = OTHER; note = misc_feature - bicyclic nucleic acid scaffold modification
  source 1..18: mol_type = other RNA
tcccaatttttcctgtag

SEQ ID NO: 3757 - RNA, 18 nt, synthetic construct
  modified_base 1: mod_base = OTHER; note = thymine
  misc_feature 1..18: note = Antisense oligonucleotide
  modified_base 1: mod_base = OTHER; note = misc_feature - bicyclic nucleic acid scaffold modification
  modified_base 4: mod_base = OTHER; note = misc_feature - bicyclic nucleic acid scaffold modification
  modified_base 18: mod_base = OTHER; note = misc_feature - bicyclic nucleic acid scaffold modification
  source 1..18: mol_type = other RNA
tcccaatttttcctgtag

SEQ ID NO: 3758 - RNA, 18 nt, synthetic construct
  modified_base 1: mod_base = OTHER; note = thymine
  misc_feature 1..18: note = Antisense oligonucleotide
  modified_base 1..2: mod_base = OTHER; note = misc_feature - bicyclic nucleic acid scaffold modification
  modified_base 18: mod_base = OTHER; note = misc_feature - bicyclic nucleic acid scaffold modification
  source 1..18: mol_type = other RNA
tcccaatttttcctgtag

SEQ ID NO: 3759 - RNA, 18 nt, synthetic construct
  modified_base 1: mod_base = OTHER; note = thymine
  misc_feature 1..18: note = Antisense oligonucleotide
  modified_base 1: mod_base = OTHER; note = misc_feature - bicyclic nucleic acid scaffold modification
  modified_base 4: mod_base = OTHER; note = misc_feature - bicyclic nucleic acid scaffold modification
  modified_base 15: mod_base = OTHER; note = misc_feature - bicyclic nucleic acid scaffold modification
  modified_base 18: mod_base = OTHER; note = misc_feature - bicyclic nucleic acid scaffold modification
  source 1..18: mol_type = other RNA
tcccaatttttcctgtag

SEQ ID NO: 3760 - RNA, 18 nt, synthetic construct
  modified_base 1: mod_base = OTHER; note = thymine
  misc_feature 1..18: note = Antisense oligonucleotide
  modified_base 1..2: mod_base = OTHER; note = misc_feature - bicyclic nucleic acid scaffold modification
  modified_base 12: mod_base = OTHER; note = misc_feature - bicyclic nucleic acid scaffold modification
  modified_base 18: mod_base = OTHER; note = misc_feature - bicyclic nucleic acid scaffold modification
  source 1..18: mol_type = other RNA
tcccaatttttcctgtag

SEQ ID NO: 3761 - RNA, 18 nt, synthetic construct
  modified_base 1: mod_base = OTHER; note = thymine
  misc_feature 1..18: note = Antisense oligonucleotide
  modified_base 1: mod_base = OTHER; note = misc_feature - bicyclic nucleic acid scaffold modification
  modified_base 3: mod_base = OTHER; note = misc_feature - bicyclic nucleic acid scaffold modification
  modified_base 15: mod_base = OTHER; note = misc_feature - bicyclic nucleic acid scaffold modification
  modified_base 18: mod_base = OTHER; note = misc_feature - bicyclic nucleic acid scaffold modification
  source 1..18: mol_type = other RNA
tcccaatttttcctgtag

SEQ ID NO: 3762 - RNA, 18 nt, synthetic construct
  modified_base 1: mod_base = OTHER; note = thymine
  misc_feature 1..18: note = Antisense oligonucleotide
  modified_base 1..2: mod_base = OTHER; note = misc_feature - bicyclic nucleic acid scaffold modification
  modified_base 17..18: mod_base = OTHER; note = misc_feature - bicyclic nucleic acid scaffold modification
  source 1..18: mol_type = other RNA
tcccaatttttcctgtag

SEQ ID NO: 3763 - RNA, 18 nt, synthetic construct
  modified_base 1: mod_base = OTHER; note = thymine
  misc_feature 1..18: note = Antisense oligonucleotide
  modified_base 1..2: mod_base = OTHER; note = misc_feature - bicyclic nucleic acid scaffold modification
  modified_base 12: mod_base = OTHER; note = misc_feature - bicyclic nucleic acid scaffold modification
  modified_base 17..18: mod_base = OTHER; note = misc_feature - bicyclic nucleic acid scaffold modification
  source 1..18: mol_type = other RNA
tcccaatttttcctgtag

SEQ ID NO: 3764 - RNA, 16 nt, synthetic construct
  modified_base 16: mod_base = OTHER; note = thymine
  misc_feature 1..16: note = Antisense oligonucleotide
  modified_base 1: mod_base = OTHER; note = misc_feature - bicyclic nucleic acid scaffold modification
  modified_base 16: mod_base = OTHER; note = misc_feature - bicyclic nucleic acid scaffold modification
  source 1..16: mol_type = other RNA
caggcttcccaatttt

SEQ ID NO: 3765 - RNA, 16 nt, synthetic construct
  modified_base 16: mod_base = OTHER; note = thymine
  misc_feature 1..16: note = Antisense oligonucleotide
  modified_base 1: mod_base = OTHER; note = misc_feature - bicyclic nucleic acid scaffold modification
  modified_base 3: mod_base = OTHER; note = misc_feature - bicyclic nucleic acid scaffold modification
  modified_base 16: mod_base = OTHER; note = misc_feature - bicyclic nucleic acid scaffold modification
  source 1..16: mol_type = other RNA
caggcttcccaatttt

SEQ ID NO: 3766 - RNA, 16 nt, synthetic construct
  modified_base 16: mod_base = OTHER; note = thymine
  misc_feature 1..16: note = Antisense oligonucleotide
  modified_base 1: mod_base = OTHER; note = misc_feature - bicyclic nucleic acid scaffold modification
  modified_base 4: mod_base = OTHER; note = misc_feature - bicyclic nucleic acid scaffold modification
  modified_base 16: mod_base = OTHER; note = misc_feature - bicyclic nucleic acid scaffold modification
  source 1..16: mol_type = other RNA
caggcttcccaatttt

SEQ ID NO: 3767 - RNA, 16 nt, synthetic construct
  modified_base 16: mod_base = OTHER; note = thymine
  misc_feature 1..16: note = Antisense oligonucleotide
  modified_base 1: mod_base = OTHER; note = misc_feature - bicyclic nucleic acid scaffold modification
  modified_base 5: mod_base = OTHER; note = misc_feature - bicyclic nucleic acid scaffold modification
  modified_base 16: mod_base = OTHER; note = misc_feature - bicyclic nucleic acid scaffold modification
  source 1..16: mol_type = other RNA
caggcttcccaatttt

SEQ ID NO: 3768 - RNA, 16 nt, synthetic construct
  modified_base 16: mod_base = OTHER; note = thymine
  misc_feature 1..16: note = Antisense oligonucleotide
  modified_base 1: mod_base = OTHER; note = misc_feature - bicyclic nucleic acid scaffold modification
  modified_base 8: mod_base = OTHER; note = misc_feature - bicyclic nucleic acid scaffold modification
  modified_base 16: mod_base = OTHER; note = misc_feature - bicyclic nucleic acid scaffold modification
  source 1..16: mol_type = other RNA
caggcttcccaatttt

SEQ ID NO: 3769 - RNA, 16 nt, synthetic construct
  modified_base 16: mod_base = OTHER; note = thymine
  misc_feature 1..16: note = Antisense oligonucleotide
  modified_base 1: mod_base = OTHER; note = misc_feature - bicyclic nucleic acid scaffold modification
  modified_base 10: mod_base = OTHER; note = misc_feature - bicyclic nucleic acid scaffold modification
  modified_base 16: mod_base = OTHER; note = misc_feature - bicyclic nucleic acid scaffold modification
  source 1..16: mol_type = other RNA
caggcttcccaatttt

SEQ ID NO: 3770 - RNA, 16 nt, synthetic construct
  modified_base 16: mod_base = OTHER; note = thymine
  misc_feature 1..16: note = Antisense oligonucleotide
  modified_base 1: mod_base = OTHER; note = misc_feature - bicyclic nucleic acid scaffold modification
  modified_base 5: mod_base = OTHER; note = misc_feature - bicyclic nucleic acid scaffold modification
  modified_base 10: mod_base = OTHER; note = misc_feature - bicyclic nucleic acid scaffold modification
  modified_base 16: mod_base = OTHER; note = misc_feature - bicyclic nucleic acid scaffold modification
  source 1..16: mol_type = other RNA
caggcttcccaatttt

SEQ ID NO: 3771 - RNA, 16 nt, synthetic construct
  modified_base 16: mod_base = OTHER; note = thymine
  misc_feature 1..16: note = Antisense oligonucleotide
  modified_base 1: mod_base = OTHER; note = misc_feature - bicyclic nucleic acid scaffold modification
  modified_base 4: mod_base = OTHER; note = misc_feature - bicyclic nucleic acid scaffold modification
  modified_base 9: mod_base = OTHER; note = misc_feature - bicyclic nucleic acid scaffold modification
  modified_base 16: mod_base = OTHER; note = misc_feature - bicyclic nucleic acid scaffold modification
  source 1..16: mol_type = other RNA
caggcttcccaatttt

SEQ ID NO: 3772 - RNA, 16 nt, synthetic construct
  modified_base 16: mod_base = OTHER; note = thymine
  misc_feature 1..16: note = Antisense oligonucleotide
  modified_base 1: mod_base = OTHER; note = misc_feature - bicyclic nucleic acid scaffold modification
  modified_base 3: mod_base = OTHER; note = misc_feature - bicyclic nucleic acid scaffold modification
  modified_base 8: mod_base = OTHER; note = misc_feature - bicyclic nucleic acid scaffold modification
  modified_base 16: mod_base = OTHER; note = misc_feature - bicyclic nucleic acid scaffold modification
  source 1..16: mol_type = other RNA
caggcttcccaatttt

SEQ ID NO: 3773 - RNA, 16 nt, synthetic construct
  modified_base 15..16: mod_base = OTHER; note = thymine
  misc_feature 1..16: note = Antisense oligonucleotide
  modified_base 1..2: mod_base = OTHER; note = misc_feature - bicyclic nucleic acid scaffold modification
  modified_base 15..16: mod_base = OTHER; note = misc_feature - bicyclic nucleic acid scaffold modification
  source 1..16: mol_type = other RNA
caggcttcccaatttt

SEQ ID NO: 3774 - RNA, 16 nt, synthetic construct
  modified_base 15..16: mod_base = OTHER; note = thymine
  misc_feature 1..16: note = Antisense oligonucleotide
  modified_base 1..2: mod_base = OTHER; note = misc_feature - bicyclic nucleic acid scaffold modification
  modified_base 8: mod_base = OTHER; note = misc_feature - bicyclic nucleic acid scaffold modification
  modified_base 15..16: mod_base = OTHER; note = misc_feature - bicyclic nucleic acid scaffold modification
  source 1..16: mol_type = other RNA
caggcttcccaatttt

SEQ ID NO: 3775 - RNA, 16 nt, synthetic construct
  misc_feature 1..16: note = Antisense oligonucleotide
  modified_base 1: mod_base = OTHER; note = misc_feature - bicyclic nucleic acid scaffold modification
  modified_base 16: mod_base = OTHER; note = misc_feature - bicyclic nucleic acid scaffold modification
  source 1..16: mol_type = other RNA
aggcttcccaattttc

SEQ ID NO: 3776 - RNA, 16 nt, synthetic construct
  misc_feature 1..16: note = Antisense oligonucleotide
  modified_base 1..2: mod_base = OTHER; note = misc_feature - bicyclic nucleic acid scaffold modification
  modified_base 16: mod_base = OTHER; note = misc_feature - bicyclic nucleic acid scaffold modification
  source 1..16: mol_type = other RNA
aggcttcccaattttc

SEQ ID NO: 3777 - RNA, 16 nt, synthetic construct
  misc_feature 1..16: note = Antisense oligonucleotide
  modified_base 1: mod_base = OTHER; note = misc_feature - bicyclic nucleic acid scaffold modification
  modified_base 3: mod_base = OTHER; note = misc_feature - bicyclic nucleic acid scaffold modification
  modified_base 16: mod_base = OTHER; note = misc_feature - bicyclic nucleic acid scaffold modification
  source 1..16: mol_type = other RNA
aggcttcccaattttc

SEQ ID NO: 3778 - RNA, 16 nt, synthetic construct
  misc_feature 1..16: note = Antisense oligonucleotide
  modified_base 1: mod_base = OTHER; note = misc_feature - bicyclic nucleic acid scaffold modification
  modified_base 4: mod_base = OTHER; note = misc_feature - bicyclic nucleic acid scaffold modification
  modified_base 16: mod_base = OTHER; note = misc_feature - bicyclic nucleic acid scaffold modification
  source 1..16: mol_type = other RNA
aggcttcccaattttc

SEQ ID NO: 3779 - RNA, 16 nt, synthetic construct
  misc_feature 1..16: note = Antisense oligonucleotide
  modified_base 1: mod_base = OTHER; note = misc_feature - bicyclic nucleic acid scaffold modification
  modified_base 7: mod_base = OTHER; note = misc_feature - bicyclic nucleic acid scaffold modification
  modified_base 16: mod_base = OTHER; note = misc_feature - bicyclic nucleic acid scaffold modification
  source 1..16: mol_type = other RNA
aggcttcccaattttc

SEQ ID NO: 3780 - RNA, 16 nt, synthetic construct
  misc_feature 1..16: note = Antisense oligonucleotide
  modified_base 1: mod_base = OTHER; note = misc_feature - bicyclic nucleic acid scaffold modification
  modified_base 8: mod_base = OTHER; note = misc_feature - bicyclic nucleic acid scaffold modification
  modified_base 16: mod_base = OTHER; note = misc_feature - bicyclic nucleic acid scaffold modification
  source 1..16: mol_type = other RNA
aggcttcccaattttc

SEQ ID NO: 3781 - RNA, 16 nt, synthetic construct
  misc_feature 1..16: note = Antisense oligonucleotide
  modified_base 1: mod_base = OTHER; note = misc_feature - bicyclic nucleic acid scaffold modification
  modified_base 9: mod_base = OTHER; note = misc_feature - bicyclic nucleic acid scaffold modification
  modified_base 16: mod_base = OTHER; note = misc_feature - bicyclic nucleic acid scaffold modification
  source 1..16: mol_type = other RNA
aggcttcccaattttc

SEQ ID NO: 3782 - RNA, 16 nt, synthetic construct
  misc_feature 1..16: note = Antisense oligonucleotide
  modified_base 1: mod_base = OTHER; note = misc_feature - bicyclic nucleic acid scaffold modification
  modified_base 4: mod_base = OTHER; note = misc_feature - bicyclic nucleic acid scaffold modification
  modified_base 9: mod_base = OTHER; note = misc_feature - bicyclic nucleic acid scaffold modification
  modified_base 16: mod_base = OTHER; note = misc_feature - bicyclic nucleic acid scaffold modification
  source 1..16: mol_type = other RNA
aggcttcccaattttc

SEQ ID NO: 3783 - RNA, 16 nt, synthetic construct
  misc_feature 1..16: note = Antisense oligonucleotide
  modified_base 1: mod_base = OTHER; note = misc_feature - bicyclic nucleic acid scaffold modification
  modified_base 3: mod_base = OTHER; note = misc_feature - bicyclic nucleic acid scaffold modification
  modified_base 8: mod_base = OTHER; note = misc_feature - bicyclic nucleic acid scaffold modification
  modified_base 16: mod_base = OTHER; note = misc_feature - bicyclic nucleic acid scaffold modification
  source 1..16: mol_type = other RNA
aggcttcccaattttc

SEQ ID NO: 3784 - RNA, 16 nt, synthetic construct
  misc_feature 1..16: note = Antisense oligonucleotide
  modified_base 1..2: mod_base = OTHER; note = misc_feature - bicyclic nucleic acid scaffold modification
  modified_base 7: mod_base = OTHER; note = misc_feature - bicyclic nucleic acid scaffold modification
  modified_base 16: mod_base = OTHER; note = misc_feature - bicyclic nucleic acid scaffold modification
  source 1..16: mol_type = other RNA
aggcttcccaattttc

SEQ ID NO: 3785 - RNA, 16 nt, synthetic construct
  modified_base 15: mod_base = OTHER; note = thymine
  misc_feature 1..16: note = Antisense oligonucleotide
  modified_base 1..2: mod_base = OTHER; note = misc_feature - bicyclic nucleic acid scaffold modification
  modified_base 15..16: mod_base = OTHER; note = misc_feature - bicyclic nucleic acid scaffold modification
  source 1..16: mol_type = other RNA
aggcttcccaattttc

SEQ ID NO: 3786 - RNA, 16 nt, synthetic construct
  modified_base 15: mod_base = OTHER; note = thymine
  misc_feature 1..16: note = Antisense oligonucleotide
  modified_base 1..2: mod_base = OTHER; note = misc_feature - bicyclic nucleic acid scaffold modification
  modified_base 9: mod_base = OTHER; note = misc_feature - bicyclic nucleic acid scaffold modification
  modified_base 15..16: mod_base = OTHER; note = misc_feature - bicyclic nucleic acid scaffold modification
  source 1..16: mol_type = other RNA
aggcttcccaattttc

SEQ ID NO: 3787 - RNA, 16 nt, synthetic construct
  misc_feature 1..16: note = Antisense oligonucleotide
  modified_base 1: mod_base = OTHER; note = misc_feature - bicyclic nucleic acid scaffold modification
  modified_base 16: mod_base = OTHER; note = misc_feature - bicyclic nucleic acid scaffold modification
  source 1..16: mol_type = other RNA
ggcttcccaattttcc

SEQ ID NO: 3788 - RNA, 16 nt, synthetic construct
  misc_feature 1..16: note = Antisense oligonucleotide
  modified_base 1..2: mod_base = OTHER; note = misc_feature - bicyclic nucleic acid scaffold modification
  modified_base 16: mod_base = OTHER; note = misc_feature - bicyclic nucleic acid scaffold modification
  source 1..16: mol_type = other RNA
ggcttcccaattttcc

SEQ ID NO: 3789 - RNA, 16 nt, synthetic construct
  misc_feature 1..16: note = Antisense oligonucleotide
  modified_base 1: mod_base = OTHER; note = misc_feature - bicyclic nucleic acid scaffold modification
  modified_base 3: mod_base = OTHER; note = misc_feature - bicyclic nucleic acid scaffold modification
  modified_base 16: mod_base = OTHER; note = misc_feature - bicyclic nucleic acid scaffold modification
  source 1..16: mol_type = other RNA
ggcttcccaattttcc

SEQ ID NO: 3790 - RNA, 16 nt, synthetic construct
  misc_feature 1..16: note = Antisense oligonucleotide
  modified_base 1: mod_base = OTHER; note = misc_feature - bicyclic nucleic acid scaffold modification
  modified_base 6: mod_base = OTHER; note = misc_feature - bicyclic nucleic acid scaffold modification
  modified_base 16: mod_base = OTHER; note = misc_feature - bicyclic nucleic acid scaffold modification
  source 1..16: mol_type = other RNA
ggcttcccaattttcc

SEQ ID NO: 3791 - RNA, 16 nt, synthetic construct
  misc_feature 1..16: note = Antisense oligonucleotide
  modified_base 1: mod_base = OTHER; note = misc_feature - bicyclic nucleic acid scaffold modification
  modified_base 8: mod_base = OTHER; note = misc_feature - bicyclic nucleic acid scaffold modification
  modified_base 16: mod_base = OTHER; note = misc_feature - bicyclic nucleic acid scaffold modification
  source 1..16: mol_type = other RNA
ggcttcccaattttcc

SEQ ID NO: 3792 - RNA, 16 nt, synthetic construct
  misc_feature 1..16: note = Antisense oligonucleotide
  modified_base 1: mod_base = OTHER; note = misc_feature - bicyclic nucleic acid scaffold modification
  modified_base 15..16: mod_base = OTHER; note = misc_feature - bicyclic nucleic acid scaffold modification
  source 1..16: mol_type = other RNA
ggcttcccaattttcc

SEQ ID NO: 3793 - RNA, 16 nt, synthetic construct
  misc_feature 1..16: note = Antisense oligonucleotide
  modified_base 1: mod_base = OTHER; note = misc_feature - bicyclic nucleic acid scaffold modification
  modified_base 3: mod_base = OTHER; note = misc_feature - bicyclic nucleic acid scaffold modification
  modified_base 8: mod_base = OTHER; note = misc_feature - bicyclic nucleic acid scaffold modification
  modified_base 16: mod_base = OTHER; note = misc_feature - bicyclic nucleic acid scaffold modification
  source 1..16: mol_type = other RNA
ggcttcccaattttcc

SEQ ID NO: 3794 - RNA, 16 nt, synthetic construct
  misc_feature 1..16: note = Antisense oligonucleotide
  modified_base 1..2: mod_base = OTHER; note = misc_feature - bicyclic nucleic acid scaffold modification
  modified_base 7: mod_base = OTHER; note = misc_feature - bicyclic nucleic acid scaffold modification
  modified_base 16: mod_base = OTHER; note = misc_feature - bicyclic nucleic acid scaffold modification
  source 1..16: mol_type = other RNA
ggcttcccaattttcc

SEQ ID NO: 3795 - RNA, 16 nt, synthetic construct
  misc_feature 1..16: note = Antisense oligonucleotide
  modified_base 1..2: mod_base = OTHER; note = misc_feature - bicyclic nucleic acid scaffold modification
  modified_base 15..16: mod_base = OTHER; note = misc_feature - bicyclic nucleic acid scaffold modification
  source 1..16: mol_type = other RNA
ggcttcccaattttcc

SEQ ID NO: 3796 - RNA, 16 nt, synthetic construct
  misc_feature 1..16: note = Antisense oligonucleotide
  modified_base 1..2: mod_base = OTHER; note = misc_feature - bicyclic nucleic acid scaffold modification
  modified_base 8: mod_base = OTHER; note = misc_feature - bicyclic nucleic acid scaffold modification
  modified_base 15..16: mod_base = OTHER; note = misc_feature - bicyclic nucleic acid scaffold modification
  source 1..16: mol_type = other RNA
ggcttcccaattttcc

SEQ ID NO: 3797 - RNA, 16 nt, synthetic construct
  misc_feature 1..16: note = Antisense oligonucleotide
  modified_base 1..2: mod_base = OTHER; note = misc_feature - bicyclic nucleic acid scaffold modification
  modified_base 6: mod_base = OTHER; note = misc_feature - bicyclic nucleic acid scaffold modification
  modified_base 15..16: mod_base = OTHER; note = misc_feature - bicyclic nucleic acid scaffold modification
  source 1..16: mol_type = other RNA
ggcttcccaattttcc

SEQ ID NO: 3798 - RNA, 16 nt, synthetic construct
  modified_base 16: mod_base = OTHER; note = thymine
  misc_feature 1..16: note = Antisense oligonucleotide
  modified_base 1: mod_base = OTHER; note = misc_feature - bicyclic nucleic acid scaffold modification
  modified_base 16: mod_base = OTHER; note = misc_feature - bicyclic nucleic acid scaffold modification
  source 1..16: mol_type = other RNA
gcttcccaattttcct

SEQ ID NO: 3799 - RNA, 16 nt, synthetic construct
  modified_base 16: mod_base = OTHER; note = thymine
  misc_feature 1..16: note = Antisense oligonucleotide
  modified_base 1..2: mod_base = OTHER; note = misc_feature - bicyclic nucleic acid scaffold modification
  modified_base 16: mod_base = OTHER; note = misc_feature - bicyclic nucleic acid scaffold modification
  source 1..16: mol_type = other RNA
gcttcccaattttcct

SEQ ID NO: 3800 - RNA, 16 nt, synthetic construct
  modified_base 16: mod_base = OTHER; note = thymine
  misc_feature 1..16: note = Antisense oligonucleotide
  modified_base 1: mod_base = OTHER; note = misc_feature - bicyclic nucleic acid scaffold modification
  modified_base 5: mod_base = OTHER; note = misc_feature - bicyclic nucleic acid scaffold modification
  modified_base 16: mod_base = OTHER; note = misc_feature - bicyclic nucleic acid scaffold modification
  source 1..16: mol_type = other RNA
gcttcccaattttcct

SEQ ID NO: 3801 - RNA, 16 nt, synthetic construct
  modified_base 16: mod_base = OTHER; note = thymine
  misc_feature 1..16: note = Antisense oligonucleotide
  modified_base 1: mod_base = OTHER; note = misc_feature - bicyclic nucleic acid scaffold modification
  modified_base 6: mod_base = OTHER; note = misc_feature - bicyclic nucleic acid scaffold modification
  modified_base 16: mod_base = OTHER; note = misc_feature - bicyclic nucleic acid scaffold modification
  source 1..16: mol_type = other RNA
gcttcccaattttcct

SEQ ID NO: 3802 - RNA, 16 nt, synthetic construct
  modified_base 16: mod_base = OTHER; note = thymine
  misc_feature 1..16: note = Antisense oligonucleotide
  modified_base 1: mod_base = OTHER; note = misc_feature - bicyclic nucleic acid scaffold modification
  modified_base 7: mod_base = OTHER; note = misc_feature - bicyclic nucleic acid scaffold modification
  modified_base 16: mod_base = OTHER; note = misc_feature - bicyclic nucleic acid scaffold modification
  source 1..16: mol_type = other RNA
gcttcccaattttcct

SEQ ID NO: 3803 - RNA, 16 nt, synthetic construct
  modified_base 16: mod_base = OTHER; note = thymine
  misc_feature 1..16: note = Antisense oligonucleotide
  modified_base 1: mod_base = OTHER; note = misc_feature - bicyclic nucleic acid scaffold modification
  modified_base 14: mod_base = OTHER; note = misc_feature - bicyclic nucleic acid scaffold modification
  modified_base 16: mod_base = OTHER; note = misc_feature - bicyclic nucleic acid scaffold modification
  source 1..16: mol_type = other RNA
gcttcccaattttcct

SEQ ID NO: 3804 - RNA, 16 nt, synthetic construct
  modified_base 16: mod_base = OTHER; note = thymine
  misc_feature 1..16: note = Antisense oligonucleotide
  modified_base 1: mod_base = OTHER; note = misc_feature - bicyclic nucleic acid scaffold modification
  modified_base 15..16: mod_base = OTHER; note = misc_feature - bicyclic nucleic acid scaffold modification
  source 1..16: mol_type = other RNA
gcttcccaattttcct

SEQ ID NO: 3805 - RNA, 16 nt, synthetic construct
  modified_base 16: mod_base = OTHER; note = thymine
  misc_feature 1..16: note = Antisense oligonucleotide
  modified_base 1: mod_base = OTHER; note = misc_feature - bicyclic nucleic acid scaffold modification
  modified_base 5: mod_base = OTHER; note = misc_feature - bicyclic nucleic acid scaffold modification
  modified_base 14: mod_base = OTHER; note = misc_feature - bicyclic nucleic acid scaffold modification
  modified_base 16: mod_base = OTHER; note = misc_feature - bicyclic nucleic acid scaffold modification
  source 1..16: mol_type = other RNA
gcttcccaattttcct

SEQ ID NO: 3806 - RNA, 16 nt, synthetic construct
  modified_base 16: mod_base = OTHER; note = thymine
  misc_feature 1..16: note = Antisense oligonucleotide
  modified_base 1..2: mod_base = OTHER; note = misc_feature - bicyclic nucleic acid scaffold modification
  modified_base 7: mod_base = OTHER; note = misc_feature - bicyclic nucleic acid scaffold modification
  modified_base 16: mod_base = OTHER; note = misc_feature - bicyclic nucleic acid scaffold modification
  source 1..16: mol_type = other RNA
gcttcccaattttcct

SEQ ID NO: 3807 - RNA, 16 nt, synthetic construct
  modified_base 16: mod_base = OTHER; note = thymine
  misc_feature 1..16: note = Antisense oligonucleotide
  modified_base 1..2: mod_base = OTHER; note = misc_feature - bicyclic nucleic acid scaffold modification
  modified_base 15..16: mod_base = OTHER; note = misc_feature - bicyclic nucleic acid scaffold modification
  source 1..16: mol_type = other RNA
gcttcccaattttcct

SEQ ID NO: 3808 - RNA, 16 nt, synthetic construct
  modified_base 16: mod_base = OTHER; note = thymine
  misc_feature 1..16: note = Antisense oligonucleotide
  modified_base 1..2: mod_base = OTHER; note = misc_feature - bicyclic nucleic acid scaffold modification
  modified_base 7: mod_base = OTHER; note = misc_feature - bicyclic nucleic acid scaffold modification
  modified_base 15..16: mod_base = OTHER; note = misc_feature - bicyclic nucleic acid scaffold modification
  source 1..16: mol_type = other RNA
gcttcccaattttcct

SEQ ID NO: 3809 - RNA, 16 nt, synthetic construct
  misc_feature 1..16: note = Antisense oligonucleotide
  modified_base 1: mod_base = OTHER; note = misc_feature - bicyclic nucleic acid scaffold modification
  modified_base 16: mod_base = OTHER; note = misc_feature - bicyclic nucleic acid scaffold modification
  source 1..16: mol_type = other RNA
cttcccaattttcctg

SEQ ID NO: 3810 - RNA, 16 nt, synthetic construct
  misc_feature 1..16: note = Antisense oligonucleotide
  modified_base 1: mod_base = OTHER; note = misc_feature - bicyclic nucleic acid scaffold modification
  modified_base 4: mod_base = OTHER; note = misc_feature - bicyclic nucleic acid scaffold modification
  modified_base 16: mod_base = OTHER; note = misc_feature - bicyclic nucleic acid scaffold modification
  source 1..16: mol_type = other RNA
cttcccaattttcctg

SEQ ID NO: 3811 - RNA, 16 nt, synthetic construct
  misc_feature 1..16: note = Antisense oligonucleotide
  modified_base 1: mod_base = OTHER; note = misc_feature - bicyclic nucleic acid scaffold modification
  modified_base 5: mod_base = OTHER; note = misc_feature - bicyclic nucleic acid scaffold modification
  modified_base 16: mod_base = OTHER; note = misc_feature - bicyclic nucleic acid scaffold modification
  source 1..16: mol_type = other RNA
cttcccaattttcctg

SEQ ID NO: 3812 - RNA, 16 nt, synthetic construct
  misc_feature 1..16: note = Antisense oligonucleotide
  modified_base 1: mod_base = OTHER; note = misc_feature - bicyclic nucleic acid scaffold modification
  modified_base 6: mod_base = OTHER; note = misc_feature - bicyclic nucleic acid scaffold modification
  modified_base 16: mod_base = OTHER; note = misc_feature - bicyclic nucleic acid scaffold modification
  source 1..16: mol_type = other RNA
cttcccaattttcctg

SEQ ID NO: 3813 - RNA, 16 nt, synthetic construct
  misc_feature 1..16: note = Antisense oligonucleotide
  modified_base 1: mod_base = OTHER; note = misc_feature - bicyclic nucleic acid scaffold modification
  modified_base 13: mod_base = OTHER; note = misc_feature - bicyclic nucleic acid scaffold modification
  modified_base 16: mod_base = OTHER; note = misc_feature - bicyclic nucleic acid scaffold modification
  source 1..16: mol_type = other RNA
cttcccaattttcctg

SEQ ID NO: 3814 - RNA, 16 nt, synthetic construct
  misc_feature 1..16: note = Antisense oligonucleotide
  modified_base 1: mod_base = OTHER; note = misc_feature - bicyclic nucleic acid scaffold modification
  modified_base 14: mod_base = OTHER; note = misc_feature - bicyclic nucleic acid scaffold modification
  modified_base 16: mod_base = OTHER; note = misc_feature - bicyclic nucleic acid scaffold modification
  source 1..16: mol_type = other RNA
cttcccaattttcctg

SEQ ID NO: 3815 - RNA, 16 nt, synthetic construct
  misc_feature 1..16: note = Antisense oligonucleotide
  modified_base 1: mod_base = OTHER; note = misc_feature - bicyclic nucleic acid scaffold modification
  modified_base 6: mod_base = OTHER; note = misc_feature - bicyclic nucleic acid scaffold modification
  modified_base 14: mod_base = OTHER; note = misc_feature - bicyclic nucleic acid scaffold modification
  modified_base 16: mod_base = OTHER; note = misc_feature - bicyclic nucleic acid scaffold modification
  source 1..16: mol_type = other RNA
cttcccaattttcctg

SEQ ID NO: 3816 - RNA, 16 nt, synthetic construct
  misc_feature 1..16: note = Antisense oligonucleotide
  modified_base 1: mod_base = OTHER; note = misc_feature - bicyclic nucleic acid scaffold modification
  modified_base 4: mod_base = OTHER; note = misc_feature - bicyclic nucleic acid scaffold modification
  modified_base 13: mod_base = OTHER; note = misc_feature - bicyclic nucleic acid scaffold modification
  modified_base 16: mod_base = OTHER; note = misc_feature - bicyclic nucleic acid scaffold modification
  source 1..16: mol_type = other RNA
cttcccaattttcctg

SEQ ID NO: 3817 - RNA, 16 nt, synthetic construct
  modified_base 2: mod_base = OTHER; note = thymine
  modified_base 15: mod_base = OTHER; note = thymine
  misc_feature 1..16: note = Antisense oligonucleotide
  modified_base 1..2: mod_base = OTHER; note = misc_feature - bicyclic nucleic acid scaffold modification
  modified_base 15..16: mod_base = OTHER; note = misc_feature - bicyclic nucleic acid scaffold modification
  source 1..16: mol_type = other RNA
cttcccaattttcctg

SEQ ID NO: 3818 - RNA, 16 nt, synthetic construct
  modified_base 2: mod_base = OTHER; note = thymine
  modified_base 15: mod_base = OTHER; note = thymine
  misc_feature 1..16: note = Antisense oligonucleotide
  modified_base 1..2: mod_base = OTHER; note = misc_feature - bicyclic nucleic acid scaffold modification
  modified_base 6: mod_base = OTHER; note = misc_feature - bicyclic nucleic acid scaffold modification
  modified_base 15..16: mod_base = OTHER; note = misc_feature - bicyclic nucleic acid scaffold modification
  source 1..16: mol_type = other RNA
cttcccaattttcctg

SEQ ID NO: 3819 - RNA, 16 nt, synthetic construct
  modified_base 2: mod_base = OTHER; note = thymine
  modified_base 15: mod_base = OTHER; note = thymine
  misc_feature 1..16: note = Antisense oligonucleotide
  modified_base 1..2: mod_base = OTHER; note = misc_feature - bicyclic nucleic acid scaffold modification
  modified_base 13: mod_base = OTHER; note = misc_feature - bicyclic nucleic acid scaffold modification
  modified_base 15..16: mod_base = OTHER; note = misc_feature - bicyclic nucleic acid scaffold modification
  source 1..16: mol_type = other RNA
cttcccaattttcctg

SEQ ID NO: 3820 - RNA, 16 nt, synthetic construct
  modified_base 1: mod_base = OTHER; note = thymine
  modified_base 16: mod_base = OTHER; note = thymine
  misc_feature 1..16: note = Antisense oligonucleotide
  modified_base 1: mod_base = OTHER; note = misc_feature - bicyclic nucleic acid scaffold modification
  modified_base 16: mod_base = OTHER; note = misc_feature - bicyclic nucleic acid scaffold modification
  source 1..16: mol_type = other RNA
ttcccaattttcctgt

SEQ ID NO: 3821 - RNA, 16 nt, synthetic construct
  modified_base 1: mod_base = OTHER; note = thymine
  modified_base 16: mod_base = OTHER; note = thymine
  misc_feature 1..16: note = Antisense oligonucleotide
  modified_base 1: mod_base = OTHER; note = misc_feature - bicyclic nucleic acid scaffold modification
  modified_base 3: mod_base = OTHER; note = misc_feature - bicyclic nucleic acid scaffold modification
  modified_base 16: mod_base = OTHER; note = misc_feature - bicyclic nucleic acid scaffold modification
  source 1..16: mol_type = other RNA
ttcccaattttcctgt

SEQ ID NO: 3822 - RNA, 16 nt, synthetic construct
  modified_base 1: mod_base = OTHER; note = thymine
  modified_base 16: mod_base = OTHER; note = thymine
  misc_feature 1..16: note = Antisense oligonucleotide
  modified_base 1: mod_base = OTHER; note = misc_feature - bicyclic nucleic acid scaffold modification
  modified_base 4: mod_base = OTHER; note = misc_feature - bicyclic nucleic acid scaffold modification
  modified_base 16: mod_base = OTHER; note = misc_feature - bicyclic nucleic acid scaffold modification
  source 1..16: mol_type = other RNA
ttcccaattttcctgt

SEQ ID NO: 3823 - RNA, 16 nt, synthetic construct
  modified_base 1: mod_base = OTHER; note = thymine
  modified_base 16: mod_base = OTHER; note = thymine
  misc_feature 1..16: note = Antisense oligonucleotide
  modified_base 1: mod_base = OTHER; note = misc_feature - bicyclic nucleic acid scaffold modification
  modified_base 5: mod_base = OTHER; note = misc_feature - bicyclic nucleic acid scaffold modification
  modified_base 16: mod_base = OTHER; note = misc_feature - bicyclic nucleic acid scaffold modification
  source 1..16: mol_type = other RNA
ttcccaattttcctgt

SEQ ID NO: 3824 - RNA, 16 nt, synthetic construct
  modified_base 1: mod_base = OTHER; note = thymine
  modified_base 16: mod_base = OTHER; note = thymine
  misc_feature 1..16: note = Antisense oligonucleotide
  modified_base 1: mod_base = OTHER; note = misc_feature - bicyclic nucleic acid scaffold modification
  modified_base 12: mod_base = OTHER; note = misc_feature - bicyclic nucleic acid scaffold modification
  modified_base 16: mod_base = OTHER; note = misc_feature - bicyclic nucleic acid scaffold modification
  source 1..16: mol_type = other RNA
ttcccaattttcctgt

SEQ ID NO: 3825 - RNA, 16 nt, synthetic construct
  modified_base 1: mod_base = OTHER; note = thymine
  modified_base 16: mod_base = OTHER; note = thymine
  misc_feature 1..16: note = Antisense oligonucleotide
  modified_base 1: mod_base = OTHER; note = misc_feature - bicyclic nucleic acid scaffold modification
  modified_base 13: mod_base = OTHER; note = misc_feature - bicyclic nucleic acid scaffold modification
  modified_base 16: mod_base = OTHER; note = misc_feature - bicyclic nucleic acid scaffold modification
  source 1..16: mol_type = other RNA
ttcccaattttcctgt

SEQ ID NO: 3826 - RNA, 16 nt, synthetic construct
  modified_base 1: mod_base = OTHER; note = thymine
  modified_base 16: mod_base = OTHER; note = thymine
  misc_feature 1..16: note = Antisense oligonucleotide
  modified_base 1: mod_base = OTHER; note = misc_feature - bicyclic nucleic acid scaffold modification
  modified_base 15..16: mod_base = OTHER; note = misc_feature - bicyclic nucleic acid scaffold modification
  source 1..16: mol_type = other RNA
ttcccaattttcctgt

SEQ ID NO: 3827 - RNA, 16 nt, synthetic construct
  modified_base 1: mod_base = OTHER; note = thymine
  modified_base 16: mod_base = OTHER; note = thymine
  misc_feature 1..16: note = Antisense oligonucleotide
  modified_base 1: mod_base = OTHER; note = misc_feature - bicyclic nucleic acid scaffold modification
  modified_base 3: mod_base = OTHER; note = misc_feature - bicyclic nucleic acid scaffold modification
  modified_base 12: mod_base = OTHER; note = misc_feature - bicyclic nucleic acid scaffold modification
  modified_base 16: mod_base = OTHER; note = misc_feature - bicyclic nucleic acid scaffold modification
  source 1..16: mol_type = other RNA
ttcccaattttcctgt

SEQ ID NO: 3828 - RNA, 16 nt, synthetic construct
  modified_base 1: mod_base = OTHER; note = thymine
  modified_base 16: mod_base = OTHER; note = thymine
  misc_feature 1..16: note = Antisense oligonucleotide
  modified_base 1: mod_base = OTHER; note = misc_feature - bicyclic nucleic acid scaffold modification
  modified_base 5: mod_base = OTHER; note = misc_feature - bicyclic nucleic acid scaffold modification
  modified_base 13: mod_base = OTHER; note = misc_feature - bicyclic nucleic acid scaffold modification
  modified_base 16: mod_base = OTHER; note = misc_feature - bicyclic nucleic acid scaffold modification
  source 1..16: mol_type = other RNA
ttcccaattttcctgt

SEQ ID NO: 3829 - RNA, 16 nt, synthetic construct
  modified_base 1..2: mod_base = OTHER; note = thymine
  modified_base 16: mod_base = OTHER; note = thymine
  misc_feature 1..16: note = Antisense oligonucleotide
  modified_base 1..2: mod_base = OTHER; note = misc_feature - bicyclic nucleic acid scaffold modification
  modified_base 15..16: mod_base = OTHER; note = misc_feature - bicyclic nucleic acid scaffold modification
  source 1..16: mol_type = other RNA
ttcccaattttcctgt

SEQ ID NO: 3830 - RNA, 16 nt, synthetic construct
  modified_base 1..2: mod_base = OTHER; note = thymine
  modified_base 16: mod_base = OTHER; note = thymine
  misc_feature 1..16: note = Antisense oligonucleotide
  modified_base 1..2: mod_base = OTHER; note = misc_feature - bicyclic nucleic acid scaffold modification
  modified_base 5: mod_base = OTHER; note = misc_feature - bicyclic nucleic acid scaffold modification
  modified_base 12: mod_base = OTHER; note = misc_feature - bicyclic nucleic acid scaffold modification
  modified_base 15..16: mod_base = OTHER; note = misc_feature - bicyclic nucleic acid scaffold modification
  source 1..16: mol_type = other RNA
ttcccaattttcctgt

SEQ ID NO: 3831 - RNA, 16 nt, synthetic construct
  modified_base 1: mod_base = OTHER; note = thymine
  misc_feature 1..16: note = Antisense oligonucleotide
  modified_base 1: mod_base = OTHER; note = misc_feature - bicyclic nucleic acid scaffold modification
  modified_base 16: mod_base = OTHER; note = misc_feature - bicyclic nucleic acid scaffold modification
  source 1..16: mol_type = other RNA
tcccaattttcctgta

SEQ ID NO: 3832 - RNA, 16 nt, synthetic construct
  modified_base 1: mod_base = OTHER; note = thymine
  misc_feature 1..16: note = Antisense oligonucleotide
  modified_base 1..2: mod_base = OTHER; note = misc_feature - bicyclic nucleic acid scaffold modification
  modified_base 16: mod_base = OTHER; note = misc_feature - bicyclic nucleic acid scaffold modification
  source 1..16: mol_type = other RNA
tcccaattttcctgta

SEQ ID NO: 3833 - RNA, 16 nt, synthetic construct
  modified_base 1: mod_base = OTHER; note = thymine
  misc_feature 1..16: note = Antisense oligonucleotide
  modified_base 1: mod_base = OTHER; note = misc_feature - bicyclic nucleic acid scaffold modification
  modified_base 3: mod_base = OTHER; note = misc_feature - bicyclic nucleic acid scaffold modification
  modified_base 16: mod_base = OTHER; note = misc_feature - bicyclic nucleic acid scaffold modification
  source 1..16: mol_type = other RNA
tcccaattttcctgta

SEQ ID NO: 3834 - RNA, 16 nt, synthetic construct
  modified_base 1: mod_base = OTHER; note = thymine
  misc_feature 1..16: note = Antisense oligonucleotide
  modified_base 1: mod_base = OTHER; note = misc_feature - bicyclic nucleic acid scaffold modification
  modified_base 4: mod_base = OTHER; note = misc_feature - bicyclic nucleic acid scaffold modification
  modified_base 16: mod_base = OTHER; note = misc_feature - bicyclic nucleic acid scaffold modification
  source 1..16: mol_type = other RNA
tcccaattttcctgta

SEQ ID NO: 3835 - RNA, 16 nt, synthetic construct
  modified_base 1: mod_base = OTHER; note = thymine
  misc_feature 1..16: note = Antisense oligonucleotide
  modified_base 1: mod_base = OTHER; note = misc_feature - bicyclic nucleic acid scaffold modification
  modified_base 11: mod_base = OTHER; note = misc_feature - bicyclic nucleic acid scaffold modification
  modified_base 16: mod_base = OTHER; note = misc_feature - bicyclic nucleic acid scaffold modification
  source 1..16: mol_type = other RNA
tcccaattttcctgta

SEQ ID NO: 3836 - RNA, 16 nt, synthetic construct
  modified_base 1: mod_base = OTHER; note = thymine
  misc_feature 1..16: note = Antisense oligonucleotide
  modified_base 1: mod_base = OTHER; note = misc_feature - bicyclic nucleic acid scaffold modification
  modified_base 12: mod_base = OTHER; note = misc_feature - bicyclic nucleic acid scaffold modification
  modified_base 16: mod_base = OTHER; note = misc_feature - bicyclic nucleic acid scaffold modification
  source 1..16: mol_type = other RNA
tcccaattttcctgta

SEQ ID NO: 3837 - RNA, 16 nt, synthetic construct
  modified_base 1: mod_base = OTHER; note = thymine
  misc_feature 1..16: note = Antisense oligonucleotide
  modified_base 1: mod_base = OTHER; note = misc_feature - bicyclic nucleic acid scaffold modification
  modified_base 14: mod_base = OTHER; note = misc_feature - bicyclic nucleic acid scaffold modification
  modified_base 16: mod_base = OTHER; note = misc_feature - bicyclic nucleic acid scaffold modification
  source 1..16: mol_type = other RNA
tcccaattttcctgta

SEQ ID NO: 3838 - RNA, 16 nt, synthetic construct
  modified_base 1: mod_base = OTHER; note = thymine
  misc_feature 1..16: note = Antisense oligonucleotide
  modified_base 1: mod_base = OTHER; note = misc_feature - bicyclic nucleic acid scaffold modification
  modified_base 4: mod_base = OTHER; note = misc_feature - bicyclic nucleic acid scaffold modification
  modified_base 14: mod_base = OTHER; note = misc_feature - bicyclic nucleic acid scaffold modification
  modified_base 16: mod_base = OTHER; note = misc_feature - bicyclic nucleic acid scaffold modification
  source 1..16: mol_type = other RNA
tcccaattttcctgta

SEQ ID NO: 3839 - RNA, 16 nt, synthetic construct
  modified_base 1: mod_base = OTHER; note = thymine
  misc_feature 1..16: note = Antisense oligonucleotide
  modified_base 1: mod_base = OTHER; note = misc_feature - bicyclic nucleic acid scaffold modification
  modified_base 4: mod_base = OTHER; note = misc_feature - bicyclic nucleic acid scaffold modification
  modified_base 12: mod_base = OTHER; note = misc_feature - bicyclic nucleic acid scaffold modification
  modified_base 16: mod_base = OTHER; note = misc_feature - bicyclic nucleic acid scaffold modification
  source 1..16: mol_type = other RNA
tcccaattttcctgta

SEQ ID NO: 3840 - RNA, 16 nt, synthetic construct
  modified_base 1: mod_base = OTHER; note = thymine
  misc_feature 1..16: note = Antisense oligonucleotide
  modified_base 1..2: mod_base = OTHER; note = misc_feature - bicyclic nucleic acid scaffold modification
  modified_base 11: mod_base = OTHER; note = misc_feature - bicyclic nucleic acid scaffold modification
  modified_base 16: mod_base = OTHER; note = misc_feature - bicyclic nucleic acid scaffold modification
  source 1..16: mol_type = other RNA
tcccaattttcctgta

SEQ ID NO: 3841 - RNA, 16 nt, synthetic construct
  modified_base 1: mod_base = OTHER; note = thymine
  misc_feature 1..16: note = Antisense oligonucleotide
  modified_base 1: mod_base = OTHER; note = misc_feature - bicyclic nucleic acid scaffold modification
  modified_base 4: mod_base = OTHER; note = misc_feature - bicyclic nucleic acid scaffold modification
  modified_base 11: mod_base = OTHER; note = misc_feature - bicyclic nucleic acid scaffold modification
  modified_base 14: mod_base = OTHER; note = misc_feature - bicyclic nucleic acid scaffold modification
  modified_base 16: mod_base = OTHER; note = misc_feature - bicyclic nucleic acid scaffold modification
  source 1..16: mol_type = other RNA
tcccaattttcctgta

SEQ ID NO: 3842 - RNA, 16 nt, synthetic construct
  modified_base 1: mod_base = OTHER; note = thymine
  modified_base 15: mod_base = OTHER; note = thymine
  misc_feature 1..16: note = Antisense oligonucleotide
  modified_base 1..2: mod_base = OTHER; note = misc_feature - bicyclic nucleic acid scaffold modification
  modified_base 15..16: mod_base = OTHER; note = misc_feature - bicyclic nucleic acid scaffold modification
  source 1..16: mol_type = other RNA
tcccaattttcctgta

SEQ ID NO: 3843 - RNA, 16 nt, synthetic construct
  modified_base 1: mod_base = OTHER; note = thymine
  modified_base 15: mod_base = OTHER; note = thymine
  misc_feature 1..16: note = Antisense oligonucleotide
  modified_base 1..2: mod_base = OTHER; note = misc_feature - bicyclic nucleic acid scaffold modification
  modified_base 11: mod_base = OTHER; note = misc_feature - bicyclic nucleic acid scaffold modification
  modified_base 15..16: mod_base = OTHER; note = misc_feature - bicyclic nucleic acid scaffold modification
  source 1..16: mol_type = other RNA
tcccaattttcctgta

SEQ ID NO: 3844 - RNA, 16 nt, synthetic construct
  misc_feature 1..16: note = Antisense oligonucleotide
  modified_base 1: mod_base = OTHER; note = misc_feature - bicyclic nucleic acid scaffold modification
  modified_base 16: mod_base = OTHER; note = misc_feature - bicyclic nucleic acid scaffold modification
  source 1..16: mol_type = other RNA
cccaattttcctgtag

SEQ ID NO: 3845 - RNA, 16 nt, synthetic construct
  misc_feature 1..16: note = Antisense oligonucleotide
  modified_base 1..2: mod_base = OTHER; note = misc_feature - bicyclic nucleic acid scaffold modification
  modified_base 16: mod_base = OTHER; note = misc_feature - bicyclic nucleic acid scaffold modification
  source 1..16: mol_type = other RNA
cccaattttcctgtag

SEQ ID NO: 3846 - RNA, 16 nt, synthetic construct
  misc_feature 1..16: note = Antisense oligonucleotide
  modified_base 1: mod_base = OTHER; note = misc_feature - bicyclic nucleic acid scaffold modification
  modified_base 3: mod_base = OTHER; note = misc_feature - bicyclic nucleic acid scaffold modification
  modified_base 16: mod_base = OTHER; note = misc_feature - bicyclic nucleic acid scaffold modification
  source 1..16: mol_type = other RNA
cccaattttcctgtag

SEQ ID NO: 3847 - RNA, 16 nt, synthetic construct
  misc_feature 1..16: note = Antisense oligonucleotide
  modified_base 1: mod_base = OTHER; note = misc_feature - bicyclic nucleic acid scaffold modification
  modified_base 10: mod_base = OTHER; note = misc_feature - bicyclic nucleic acid scaffold modification
  modified_base 16: mod_base = OTHER; note = misc_feature - bicyclic nucleic acid scaffold modification
  source 1..16: mol_type = other RNA
cccaattttcctgtag

SEQ ID NO: 3848 - RNA, 16 nt, synthetic construct
  misc_feature 1..16: note = Antisense oligonucleotide
  modified_base 1: mod_base = OTHER; note = misc_feature - bicyclic nucleic acid scaffold modification
  modified_base 11: mod_base = OTHER; note = misc_feature - bicyclic nucleic acid scaffold modification
  modified_base 16: mod_base = OTHER; note = misc_feature - bicyclic nucleic acid scaffold modification
  source 1..16: mol_type = other RNA
cccaattttcctgtag

SEQ ID NO: 3849 - RNA, 16 nt, synthetic construct
  misc_feature 1..16: note = Antisense oligonucleotide
  modified_base 1: mod_base = OTHER; note = misc_feature - bicyclic nucleic acid scaffold modification
  modified_base 13: mod_base = OTHER; note = misc_feature - bicyclic nucleic acid scaffold modification
  modified_base 16: mod_base = OTHER; note = misc_feature - bicyclic nucleic acid scaffold modification
  source 1..16: mol_type = other RNA
cccaattttcctgtag

SEQ ID NO: 3850 - RNA, 16 nt, synthetic construct
  misc_feature 1..16: note = Antisense oligonucleotide
  modified_base 1: mod_base = OTHER; note = misc_feature - bicyclic nucleic acid scaffold modification
  modified_base 3: mod_base = OTHER; note = misc_feature - bicyclic nucleic acid scaffold modification
  modified_base 13: mod_base = OTHER; note = misc_feature - bicyclic nucleic acid scaffold modification
  modified_base 16: mod_base = OTHER; note = misc_feature - bicyclic nucleic acid scaffold modification
  source 1..16: mol_type = other RNA
cccaattttcctgtag

SEQ ID NO: 3851 - RNA, 16 nt, synthetic construct
  misc_feature 1..16: note = Antisense oligonucleotide
  modified_base 1: mod_base = OTHER; note = misc_feature - bicyclic nucleic acid scaffold modification
  modified_base 10: mod_base = OTHER; note = misc_feature - bicyclic nucleic acid scaffold modification
  modified_base 13: mod_base = OTHER; note = misc_feature - bicyclic nucleic acid scaffold modification
  modified_base 16: mod_base = OTHER; note = misc_feature - bicyclic nucleic acid scaffold modification
  source 1..16: mol_type = other RNA
cccaattttcctgtag

SEQ ID NO: 3852 - RNA, 16 nt, synthetic construct
  misc_feature 1..16: note = Antisense oligonucleotide
  modified_base 1: mod_base = OTHER; note = misc_feature - bicyclic nucleic acid scaffold modification
  modified_base 3: mod_base = OTHER; note = misc_feature - bicyclic nucleic acid scaffold modification
  modified_base 11: mod_base = OTHER; note = misc_feature - bicyclic nucleic acid scaffold modification
  modified_base 16: mod_base = OTHER; note = misc_feature - bicyclic nucleic acid scaffold modification
  source 1..16: mol_type = other RNA
cccaattttcctgtag

SEQ ID NO: 3853 - RNA, 16 nt, synthetic construct
  misc_feature 1..16: note = Antisense oligonucleotide
  modified_base 1..2: mod_base = OTHER; note = misc_feature - bicyclic nucleic acid scaffold modification
  modified_base 15..16: mod_base = OTHER; note = misc_feature - bicyclic nucleic acid scaffold modification
  source 1..16: mol_type = other RNA
cccaattttcctgtag

SEQ ID NO: 3854 - RNA, 16 nt, synthetic construct
  misc_feature 1..16: note = Antisense oligonucleotide
  modified_base 1..2: mod_base = OTHER; note = misc_feature - bicyclic nucleic acid scaffold modification
  modified_base 10: mod_base = OTHER; note = misc_feature - bicyclic nucleic acid scaffold modification
  modified_base 15..16: mod_base = OTHER; note = misc_feature - bicyclic nucleic acid scaffold modification
  source 1..16: mol_type = other RNA
cccaattttcctgtag

SEQ ID NO: 3855 - RNA, 25 nt, synthetic construct
  modified_base 1: mod_base = OTHER; note = thymine
  misc_feature 1..25: note = Antisense oligonucleotide
  modified_base 1: mod_base = OTHER; note = misc_feature - bicyclic nucleic acid scaffold modification
  modified_base 7: mod_base = OTHER; note = misc_feature - n is inosine, often denoted as i
  modified_base 25: mod_base = OTHER; note = misc_feature - bicyclic nucleic acid scaffold modification
  source 1..25: mol_type = other RNA
tttgccnctgcccaatgccatcctg

SEQ ID NO: 3856 - RNA, 25 nt, synthetic construct
  modified_base 1: mod_base = OTHER; note = thymine
  misc_feature 1..25: note = Antisense oligonucleotide
  modified_base 1: mod_base = OTHER; note = misc_feature - bicyclic nucleic acid scaffold modification
  modified_base 4: mod_base = OTHER; note = misc_feature - bicyclic nucleic acid scaffold modification
  modified_base 7: mod_base = OTHER; note = misc_feature - n is inosine, often denoted as i
  modified_base 25: mod_base = OTHER; note = misc_feature - bicyclic nucleic acid scaffold modification
  source 1..25: mol_type = other RNA
tttgccnctgcccaatgccatcctg

SEQ ID NO: 3857 - RNA, 25 nt, synthetic construct
  modified_base 1: mod_base = OTHER; note = thymine
  misc_feature 1..25: note = Antisense oligonucleotide
  modified_base 1: mod_base = OTHER; note = misc_feature - bicyclic nucleic acid scaffold modification
  modified_base 7: mod_base = OTHER; note = misc_feature - n is inosine, often denoted as i
  modified_base 10: mod_base = OTHER; note = misc_feature - bicyclic nucleic acid scaffold modification
  modified_base 25: mod_base = OTHER; note = misc_feature - bicyclic nucleic acid scaffold modification
  source 1..25: mol_type = other RNA
tttgccnctgcccaatgccatcctg

SEQ ID NO: 3858 - RNA, 25 nt, synthetic construct
  modified_base 1: mod_base = OTHER; note = thymine
  misc_feature 1..25: note = Antisense oligonucleotide
  modified_base 1: mod_base = OTHER; note = misc_feature - bicyclic nucleic acid scaffold modification
  modified_base 7: mod_base = OTHER; note = misc_feature - n is inosine, often denoted as i
  modified_base 17: mod_base = OTHER; note = misc_feature - bicyclic nucleic acid scaffold modification
  modified_base 25: mod_base = OTHER; note = misc_feature - bicyclic nucleic acid scaffold modification
  source 1..25: mol_type = other RNA
tttgccnctgcccaatgccatcctg

SEQ ID NO: 3859 - RNA, 25 nt, synthetic construct
  modified_base 1: mod_base = OTHER; note = thymine
  misc_feature 1..25: note = Antisense oligonucleotide
  modified_base 1: mod_base = OTHER; note = misc_feature - bicyclic nucleic acid scaffold modification
  modified_base 7: mod_base = OTHER; note = misc_feature - n is inosine, often denoted as i
  modified_base 23: mod_base = OTHER; note = misc_feature - bicyclic nucleic acid scaffold modification
  modified_base 25: mod_base = OTHER; note = misc_feature - bicyclic nucleic acid scaffold modification
  source 1..25: mol_type = other RNA
tttgccnctgcccaatgccatcctg

SEQ ID NO: 3860 - RNA, 25 nt, synthetic construct
  modified_base 1: mod_base = OTHER; note = thymine
  misc_feature 1..25: note = Antisense oligonucleotide
  modified_base 1: mod_base = OTHER; note = misc_feature - bicyclic nucleic acid scaffold modification
  modified_base 7: mod_base = OTHER; note = misc_feature - n is inosine, often denoted as i
  modified_base 19: mod_base = OTHER; note = misc_feature - bicyclic nucleic acid scaffold modification
  modified_base 25: mod_base = OTHER; note = misc_feature - bicyclic nucleic acid scaffold modification
  source 1..25: mol_type = other RNA
tttgccnctgcccaatgccatcctg

SEQ ID NO: 3861 - RNA, 25 nt, synthetic construct
  modified_base 1: mod_base = OTHER; note = thymine
  misc_feature 1..25: note = Antisense oligonucleotide
  modified_base 1: mod_base = OTHER; note = misc_feature - bicyclic nucleic acid scaffold modification
  modified_base 7: mod_base = OTHER; note = misc_feature - n is inosine, often denoted as i
  modified_base 13: mod_base = OTHER; note = misc_feature - bicyclic nucleic acid scaffold modification
  modified_base 25: mod_base = OTHER; note = misc_feature - bicyclic nucleic acid scaffold modification
  source 1..25: mol_type = other RNA
tttgccnctgcccaatgccatcctg

SEQ ID NO: 3862 - RNA, 25 nt, synthetic construct
  modified_base 1: mod_base = OTHER; note = thymine
  misc_feature 1..25: note = Antisense oligonucleotide
  modified_base 1: mod_base = OTHER; note = misc_feature - bicyclic nucleic acid scaffold modification
  modified_base 6: mod_base = OTHER; note = misc_feature - bicyclic nucleic acid scaffold modification
  modified_base 7: mod_base = OTHER; note = misc_feature - n is inosine, often denoted as i
  modified_base 25: mod_base = OTHER; note = misc_feature - bicyclic nucleic acid scaffold modification
  source 1..25: mol_type = other RNA
tttgccnctgcccaatgccatcctg

SEQ ID NO: 3863 - RNA, 25 nt, synthetic construct
  modified_base 1: mod_base = OTHER; note = thymine
  misc_feature 1..25: note = Antisense oligonucleotide
  modified_base 1: mod_base = OTHER; note = misc_feature - bicyclic nucleic acid scaffold modification
  modified_base 4: mod_base = OTHER; note = misc_feature - bicyclic nucleic acid scaffold modification
  modified_base 7: mod_base = OTHER; note = misc_feature - n is inosine, often denoted as i
  modified_base 10: mod_base = OTHER; note = misc_feature - bicyclic nucleic acid scaffold modification
  modified_base 25: mod_base = OTHER; note = misc_feature - bicyclic nucleic acid scaffold modification
  source 1..25: mol_type = other RNA
tttgccnctgcccaatgccatcctg

SEQ ID NO: 3864 - RNA, 25 nt, synthetic construct
  modified_base 1: mod_base = OTHER; note = thymine
  misc_feature 1..25: note = Antisense oligonucleotide
  modified_base 1: mod_base = OTHER; note = misc_feature - bicyclic nucleic acid scaffold modification
  modified_base 7: mod_base = OTHER; note = misc_feature - n is inosine, often denoted as i
  modified_base 10: mod_base = OTHER; note = misc_feature - bicyclic nucleic acid scaffold modification
  modified_base 17: mod_base = OTHER; note = misc_feature - bicyclic nucleic acid scaffold modification
  modified_base 25: mod_base = OTHER; note = misc_feature - bicyclic nucleic acid scaffold modification
  source 1..25: mol_type = other RNA
tttgccnctgcccaatgccatcctg

SEQ ID NO: 3865 - RNA, 25 nt, synthetic construct
  modified_base 1: mod_base = OTHER; note = thymine
  misc_feature 1..25: note = Antisense oligonucleotide
  modified_base 1: mod_base = OTHER; note = misc_feature - bicyclic nucleic acid scaffold modification
  modified_base 6: mod_base = OTHER; note = misc_feature - bicyclic nucleic acid scaffold modification
  modified_base 7: mod_base = OTHER; note = misc_feature - n is inosine, often denoted as i
  modified_base 23: mod_base = OTHER; note = misc_feature - bicyclic nucleic acid scaffold modification
  modified_base 25: mod_base = OTHER; note = misc_feature - bicyclic nucleic acid scaffold modification
  source 1..25: mol_type = other RNA
tttgccnctgcccaatgccatcctg

SEQ ID NO: 3866 - RNA, 25 nt, synthetic construct
  modified_base 1: mod_base = OTHER; note = thymine
  misc_feature 1..25: note = Antisense oligonucleotide
  modified_base 1: mod_base = OTHER; note = misc_feature - bicyclic nucleic acid scaffold modification
  modified_base 7: mod_base = OTHER; note = misc_feature - n is inosine, often denoted as i
  modified_base 13: mod_base = OTHER; note = misc_feature - bicyclic nucleic acid scaffold modification
  modified_base 19: mod_base = OTHER; note = misc_feature - bicyclic nucleic acid scaffold modification
  modified_base 25: mod_base = OTHER; note = misc_feature - bicyclic nucleic acid scaffold modification
  source 1..25: mol_type = other RNA
tttgccnctgcccaatgccatcctg

SEQ ID NO: 3867 - RNA, 25 nt, synthetic construct
  modified_base 1: mod_base = OTHER; note = thymine
  misc_feature 1..25: note = Antisense oligonucleotide
  modified_base 1: mod_base = OTHER; note = misc_feature - bicyclic nucleic acid scaffold modification
  modified_base 6: mod_base = OTHER; note = misc_feature - bicyclic nucleic acid scaffold modification
  modified_base 7: mod_base = OTHER; note = misc_feature - n is inosine, often denoted as i
  modified_base 13: mod_base = OTHER; note = misc_feature - bicyclic nucleic acid scaffold modification
  modified_base 25: mod_base = OTHER; note = misc_feature - bicyclic nucleic acid scaffold modification
  source 1..25: mol_type = other RNA
tttgccnctgcccaatgccatcctg

SEQ ID NO: 3868 - RNA, 25 nt, synthetic construct
  modified_base 1: mod_base = OTHER; note = thymine
  misc_feature 1..25: note = Antisense oligonucleotide
  modified_base 1: mod_base = OTHER; note = misc_feature - bicyclic nucleic acid scaffold modification
  modified_base 4: mod_base = OTHER; note = misc_feature - bicyclic nucleic acid scaffold modification
  modified_base 7: mod_base = OTHER; note = misc_feature - n is inosine, often denoted as i
  modified_base 10: mod_base = OTHER; note = misc_feature - bicyclic nucleic acid scaffold modification
  modified_base 17: mod_base = OTHER; note = misc_feature - bicyclic nucleic acid scaffold modification
  modified_base 25: mod_base = OTHER; note = misc_feature - bicyclic nucleic acid scaffold modification
  source 1..25: mol_type = other RNA
tttgccnctgcccaatgccatcctg

SEQ ID NO: 3869 - RNA, 25 nt, synthetic construct
  modified_base 1..2: mod_base = OTHER; note = thymine
  modified_base 24: mod_base = OTHER; note = thymine
  misc_feature 1..25: note = Antisense oligonucleotide
  modified_base 1..2: mod_base = OTHER; note = misc_feature - bicyclic nucleic acid scaffold modification
  modified_base 7: mod_base = OTHER; note = misc_feature - n is inosine, often denoted as i
  modified_base 17: mod_base = OTHER; note = misc_feature - bicyclic nucleic acid scaffold modification
  modified_base 24..25: mod_base = OTHER; note = misc_feature - bicyclic nucleic acid scaffold modification
  source 1..25: mol_type = other RNA
tttgccnctgcccaatgccatcctg

SEQ ID NO: 3870 - RNA, 25 nt, synthetic construct
  modified_base 1..2: mod_base = OTHER; note = thymine
  modified_base 24: mod_base = OTHER; note = thymine
  misc_feature 1..25: note = Antisense oligonucleotide
  modified_base 1..2: mod_base = OTHER; note = misc_feature - bicyclic nucleic acid scaffold modification
  modified_base 7: mod_base = OTHER; note = misc_feature - n is inosine, often denoted as i
  modified_base 10: mod_base = OTHER; note = misc_feature - bicyclic nucleic acid scaffold modification
  modified_base 17: mod_base = OTHER; note = misc_feature - bicyclic nucleic acid scaffold modification
  modified_base 24..25: mod_base = OTHER; note = misc_feature - bicyclic nucleic acid scaffold modification
  source 1..25: mol_type = other RNA
tttgccnctgcccaatgccatcctg

SEQ ID NO: 3871 - RNA, 22 nt, synthetic construct
  modified_base 1: mod_base = OTHER; note = thymine
  misc_feature 1..22: note = Antisense oligonucleotide
  modified_base 1: mod_base = OTHER; note = misc_feature - bicyclic nucleic acid scaffold modification
  modified_base 4: mod_base = OTHER; note = misc_feature - bicyclic nucleic acid scaffold modification
  modified_base 7: mod_base = OTHER; note = misc_feature - n is inosine, often denoted as i
  modified_base 22: mod_base = OTHER; note = misc_feature - bicyclic nucleic acid scaffold modification
  source 1..22: mol_type = other RNA
tttgccnctgcccaatgccatc

SEQ ID NO: 3872 - RNA, 22 nt, synthetic construct
  modified_base 1: mod_base = OTHER; note = thymine
  misc_feature 1..22: note = Antisense oligonucleotide
  modified_base 1: mod_base = OTHER; note = misc_feature - bicyclic nucleic acid scaffold modification
  modified_base 7: mod_base = OTHER; note = misc_feature - n is inosine, often denoted as i
  modified_base 10: mod_base = OTHER; note = misc_feature - bicyclic nucleic acid scaffold modification
  modified_base 22: mod_base = OTHER; note = misc_feature - bicyclic nucleic acid scaffold modification
  source 1..22: mol_type = other RNA
tttgccnctgcccaatgccatc

SEQ ID NO: 3873 - RNA, 22 nt, synthetic construct
  modified_base 1: mod_base = OTHER; note = thymine
  misc_feature 1..22: note = Antisense oligonucleotide
  modified_base 1: mod_base = OTHER; note = misc_feature - bicyclic nucleic acid scaffold modification
  modified_base 7: mod_base = OTHER; note = misc_feature - n is inosine, often denoted as i
  modified_base 17: mod_base = OTHER; note = misc_feature - bicyclic nucleic acid scaffold modification
  modified_base 22: mod_base = OTHER; note = misc_feature - bicyclic nucleic acid scaffold modification
  source 1..22: mol_type = other RNA
tttgccnctgcccaatgccatc

SEQ ID NO: 3874 - RNA, 22 nt, synthetic construct
  modified_base 1: mod_base = OTHER; note = thymine
  misc_feature 1..22: note = Antisense oligonucleotide
  modified_base 1: mod_base = OTHER; note = misc_feature - bicyclic nucleic acid scaffold modification
  modified_base 7: mod_base = OTHER; note = misc_feature - n is inosine, often denoted as i
  modified_base 19: mod_base = OTHER; note = misc_feature - bicyclic nucleic acid scaffold modification
  modified_base 22: mod_base = OTHER; note = misc_feature - bicyclic nucleic acid scaffold modification
  source 1..22: mol_type = other RNA
tttgccnctgcccaatgccatc

SEQ ID NO: 3875 - RNA, 22 nt, synthetic construct
  modified_base 1: mod_base = OTHER; note = thymine
  misc_feature 1..22: note = Antisense oligonucleotide
  modified_base 1: mod_base = OTHER; note = misc_feature - bicyclic nucleic acid scaffold modification
  modified_base 7: mod_base = OTHER; note = misc_feature - n is inosine, often denoted as i
  modified_base 13: mod_base = OTHER; note = misc_feature - bicyclic nucleic acid scaffold modification
  modified_base 22: mod_base = OTHER; note = misc_feature - bicyclic nucleic acid scaffold modification
  source 1..22: mol_type = other RNA
tttgccnctgcccaatgccatc

SEQ ID NO: 3876 - RNA, 22 nt, synthetic construct
  modified_base 1: mod_base = OTHER; note = thymine
  misc_feature 1..22: note = Antisense oligonucleotide
  modified_base 1: mod_base = OTHER; note = misc_feature - bicyclic nucleic acid scaffold modification
  modified_base 7: mod_base = OTHER; note = misc_feature - n is inosine, often denoted as i
  modified_base 8: mod_base = OTHER; note = misc_feature - bicyclic nucleic acid scaffold modification
  modified_base 22: mod_base = OTHER; note = misc_feature - bicyclic nucleic acid scaffold modification
  source 1..22: mol_type = other RNA
tttgccnctgcccaatgccatc

SEQ ID NO: 3877 - RNA, 22 nt, synthetic construct
  modified_base 1: mod_base = OTHER; note = thymine
  misc_feature 1..22: note = Antisense oligonucleotide
  modified_base 1: mod_base = OTHER; note = misc_feature - bicyclic nucleic acid scaffold modification
  modified_base 6: mod_base = OTHER; note = misc_feature - bicyclic nucleic acid scaffold modification
  modified_base 7: mod_base = OTHER; note = misc_feature - n is inosine, often denoted as i
  modified_base 22: mod_base = OTHER; note = misc_feature - bicyclic nucleic acid scaffold modification
  source 1..22: mol_type = other RNA
tttgccnctgcccaatgccatc

SEQ ID NO: 3878 - RNA, 22 nt, synthetic construct
  modified_base 1: mod_base = OTHER; note = thymine
  misc_feature 1..22: note = Antisense oligonucleotide
  modified_base 1: mod_base = OTHER; note = misc_feature - bicyclic nucleic acid scaffold modification
  modified_base 7: mod_base = OTHER; note = misc_feature - n is inosine, often denoted as i
  modified_base 13: mod_base = OTHER; note = misc_feature - bicyclic nucleic acid scaffold modification
  modified_base 19: mod_base = OTHER; note = misc_feature - bicyclic nucleic acid scaffold modification
  modified_base 22: mod_base = OTHER; note = misc_feature - bicyclic nucleic acid scaffold modification
  source 1..22: mol_type = other RNA
tttgccnctgcccaatgccatc

SEQ ID NO: 3879 - RNA, 22 nt, synthetic construct
  modified_base 1: mod_base = OTHER; note = thymine
  misc_feature 1..22: note = Antisense oligonucleotide
  modified_base 1: mod_base = OTHER; note = misc_feature - bicyclic nucleic acid scaffold modification
  modified_base 7: mod_base = OTHER; note = misc_feature - n is inosine, often denoted as i
  modified_base 8: mod_base = OTHER; note = misc_feature - bicyclic nucleic acid scaffold modification
  modified_base 13: mod_base = OTHER; note = misc_feature - bicyclic nucleic acid scaffold modification
  modified_base 22: mod_base = OTHER; note = misc_feature - bicyclic nucleic acid scaffold modification
  source 1..22: mol_type = other RNA
tttgccnctgcccaatgccatc

SEQ ID NO: 3880 - RNA, 22 nt, synthetic construct
  modified_base 1: mod_base = OTHER; note = thymine
  misc_feature 1..22: note = Antisense oligonucleotide
  modified_base 1: mod_base = OTHER; note = misc_feature - bicyclic nucleic acid scaffold modification
  modified_base 4: mod_base = OTHER; note = misc_feature - bicyclic nucleic acid scaffold modification
  modified_base 7: mod_base = OTHER; note = misc_feature - n is inosine, often denoted as i
  modified_base 10: mod_base = OTHER; note = misc_feature - bicyclic nucleic acid scaffold modification
  modified_base 17: mod_base = OTHER; note = misc_feature - bicyclic nucleic acid scaffold modification
  modified_base 22: mod_base = OTHER; note = misc_feature - bicyclic nucleic acid scaffold modification
  source 1..22: mol_type = other RNA
tttgccnctgcccaatgccatc

SEQ ID NO: 3881 - RNA, 22 nt, synthetic construct
  modified_base 1..2: mod_base = OTHER; note = thymine
  modified_base 21: mod_base = OTHER; note = thymine
  misc_feature 1..22: note = Antisense oligonucleotide
  modified_base 1..2: mod_base = OTHER; note = misc_feature - bicyclic nucleic acid scaffold modification
  modified_base 7: mod_base = OTHER; note = misc_feature - n is inosine, often denoted as i
  modified_base 21..22: mod_base = OTHER; note = misc_feature - bicyclic nucleic acid scaffold modification
  source 1..22: mol_type = other RNA
tttgccnctgcccaatgccatc

SEQ ID NO: 3882 - RNA, 22 nt, synthetic construct
  modified_base 1..2: mod_base = OTHER; note = thymine
  modified_base 21: mod_base = OTHER; note = thymine
  misc_feature 1..22: note = Antisense oligonucleotide
  modified_base 1..2: mod_base = OTHER; note = misc_feature - bicyclic nucleic acid scaffold modification
  modified_base 7: mod_base = OTHER; note = misc_feature - n is inosine, often denoted as i
  modified_base 10: mod_base = OTHER; note = misc_feature - bicyclic nucleic acid scaffold modification
  modified_base 21..22: mod_base = OTHER; note = misc_feature - bicyclic nucleic acid scaffold modification
  source 1..22: mol_type = other RNA
tttgccnctgcccaatgccatc

SEQ ID NO: 3883 - RNA, 22 nt, synthetic construct
  modified_base 1..2: mod_base = OTHER; note = thymine
  modified_base 21: mod_base = OTHER; note = thymine
  misc_feature 1..22: note = Antisense oligonucleotide
  modified_base 1..2: mod_base = OTHER; note = misc_feature - bicyclic nucleic acid scaffold modification
  modified_base 7: mod_base = OTHER; note = misc_feature - n is inosine, often denoted as i
  modified_base 17: mod_base = OTHER; note = misc_feature - bicyclic nucleic acid scaffold modification
  modified_base 21..22: mod_base = OTHER; note = misc_feature - bicyclic nucleic acid scaffold modification
  source 1..22: mol_type = other RNA
tttgccnctgcccaatgccatc

SEQ ID NO: 3884 - RNA, 22 nt, synthetic construct
  modified_base 1: mod_base = OTHER; note = thymine
  misc_feature 1..22: note = Antisense oligonucleotide
  modified_base 1: mod_base = OTHER; note = misc_feature - bicyclic nucleic acid scaffold modification
  modified_base 6: mod_base = OTHER; note = misc_feature - n is inosine, often denoted as i
  modified_base 22: mod_base = OTHER; note = misc_feature - bicyclic nucleic acid scaffold modification
  source 1..22: mol_type = other RNA
ttgccnctgcccaatgccatcc

SEQ ID NO: 3885 - RNA, 22 nt, synthetic construct
  modified_base 1: mod_base = OTHER; note = thymine
  misc_feature 1..22: note = Antisense oligonucleotide
  modified_base 1: mod_base = OTHER; note = misc_feature - bicyclic nucleic acid scaffold modification
  modified_base 3: mod_base = OTHER; note = misc_feature - bicyclic nucleic acid scaffold modification
  modified_base 6: mod_base = OTHER; note = misc_feature - n is inosine, often denoted as i
  modified_base 22: mod_base = OTHER; note = misc_feature - bicyclic nucleic acid scaffold modification
  source 1..22: mol_type = other RNA
ttgccnctgcccaatgccatcc

SEQ ID NO: 3886 - RNA, 22 nt, synthetic construct
  modified_base 1: mod_base = OTHER; note = thymine
  misc_feature 1..22: note = Antisense oligonucleotide
  modified_base 1: mod_base = OTHER; note = misc_feature - bicyclic nucleic acid scaffold modification
  modified_base 6: mod_base = OTHER; note = misc_feature - n is inosine, often denoted as i
  modified_base 9: mod_base = OTHER; note = misc_feature - bicyclic nucleic acid scaffold modification
  modified_base 22: mod_base = OTHER; note = misc_feature - bicyclic nucleic acid scaffold modification
  source 1..22: mol_type = other RNA
ttgccnctgcccaatgccatcc

SEQ ID NO: 3887 - RNA, 22 nt, synthetic construct
  modified_base 1: mod_base = OTHER; note = thymine
  misc_feature 1..22: note = Antisense oligonucleotide
  modified_base 1: mod_base = OTHER; note = misc_feature - bicyclic nucleic acid scaffold modification
  modified_base 6: mod_base = OTHER; note = misc_feature - n is inosine, often denoted as i
  modified_base 16: mod_base = OTHER; note = misc_feature - bicyclic nucleic acid scaffold modification
  modified_base 22: mod_base = OTHER; note = misc_feature - bicyclic nucleic acid scaffold modification
  source 1..22: mol_type = other RNA
ttgccnctgcccaatgccatcc

SEQ ID NO: 3888 - RNA, 22 nt, synthetic construct
  modified_base 1: mod_base = OTHER; note = thymine
  misc_feature 1..22: note = Antisense oligonucleotide
  modified_base 1: mod_base = OTHER; note = misc_feature - bicyclic nucleic acid scaffold modification
  modified_base 6: mod_base = OTHER; note = misc_feature - n is inosine, often denoted as i
  modified_base 18: mod_base = OTHER; note = misc_feature - bicyclic nucleic acid scaffold modification
  modified_base 22: mod_base = OTHER; note = misc_feature - bicyclic nucleic acid scaffold modification
  source 1..22: mol_type = other RNA
ttgccnctgcccaatgccatcc

SEQ ID NO: 3889 - RNA, 22 nt, synthetic construct
  modified_base 1: mod_base = OTHER; note = thymine
  misc_feature 1..22: note = Antisense oligonucleotide
  modified_base 1: mod_base = OTHER; note = misc_feature - bicyclic nucleic acid scaffold modification
  modified_base 6: mod_base = OTHER; note = misc_feature - n is inosine, often denoted as i
  modified_base 12: mod_base = OTHER; note = misc_feature - bicyclic nucleic acid scaffold modification
  modified_base 22: mod_base = OTHER; note = misc_feature - bicyclic nucleic acid scaffold modification
  source 1..22: mol_type = other RNA
ttgccnctgcccaatgccatcc

SEQ ID NO: 3890 - RNA, 22 nt, synthetic construct
  modified_base 1: mod_base = OTHER; note = thymine
  misc_feature 1..22: note = Antisense oligonucleotide
  modified_base 1: mod_base = OTHER; note = misc_feature - bicyclic nucleic acid scaffold modification
  modified_base 6: mod_base = OTHER; note = misc_feature - n is inosine, often denoted as i
  modified_base 7: mod_base = OTHER; note = misc_feature - bicyclic nucleic acid scaffold modification
  modified_base 22: mod_base = OTHER; note = misc_feature - bicyclic nucleic acid scaffold modification
  source 1..22: mol_type = other RNA
ttgccnctgcccaatgccatcc

SEQ ID NO: 3891 - RNA, 22 nt, synthetic construct
  modified_base 1: mod_base = OTHER; note = thymine
  misc_feature 1..22: note = Antisense oligonucleotide
  modified_base 1: mod_base = OTHER; note = misc_feature - bicyclic nucleic acid scaffold modification
  modified_base 3: mod_base = OTHER; note = misc_feature - bicyclic nucleic acid scaffold modification
  modified_base 6: mod_base = OTHER; note = misc_feature - n is inosine, often denoted as i
  modified_base 9: mod_base = OTHER; note = misc_feature - bicyclic nucleic acid scaffold modification
  modified_base 22: mod_base = OTHER; note = misc_feature - bicyclic nucleic acid scaffold modification
  source 1..22: mol_type = other RNA
ttgccnctgcccaatgccatcc

SEQ ID NO: 3892 - RNA, 22 nt, synthetic construct
  modified_base 1: mod_base = OTHER; note = thymine
  misc_feature 1..22: note = Antisense oligonucleotide
  modified_base 1: mod_base = OTHER; note = misc_feature - bicyclic nucleic acid scaffold modification
  modified_base 6: mod_base = OTHER; note = misc_feature - n is inosine, often denoted as i
  modified_base 9: mod_base = OTHER; note = misc_feature - bicyclic nucleic acid scaffold modification
  modified_base 16: mod_base = OTHER; note = misc_feature - bicyclic nucleic acid scaffold modification
  modified_base 22: mod_base = OTHER; note = misc_feature - bicyclic nucleic acid scaffold modification
  source 1..22: mol_type = other RNA
ttgccnctgcccaatgccatcc

SEQ ID NO: 3893 - RNA, 22 nt, synthetic construct
  modified_base 1: mod_base = OTHER; note = thymine
  misc_feature 1..22: note = Antisense oligonucleotide
  modified_base 1: mod_base = OTHER; note = misc_feature - bicyclic nucleic acid scaffold modification
  modified_base 6: mod_base = OTHER; note = misc_feature - n is inosine, often denoted as i
  modified_base 7: mod_base = OTHER; note = misc_feature - bicyclic nucleic acid scaffold modification
  modified_base 12: mod_base = OTHER; note = misc_feature - bicyclic nucleic acid scaffold modification
  modified_base 18: mod_base = OTHER; note = misc_feature - bicyclic nucleic acid scaffold modification
  modified_base 22: mod_base = OTHER; note = misc_feature - bicyclic nucleic acid scaffold modification
  source 1..22: mol_type = other RNA
ttgccnctgcccaatgccatcc

SEQ ID NO: 3894 - RNA, 22 nt, synthetic construct
  modified_base 1..2: mod_base = OTHER; note = thymine
  misc_feature 1..22: note = Antisense oligonucleotide
  modified_base 1..2: mod_base = OTHER; note = misc_feature - bicyclic nucleic acid scaffold modification
  modified_base 6: mod_base = OTHER; note = misc_feature - n is inosine, often denoted as i
  modified_base 21..22: mod_base = OTHER; note = misc_feature - bicyclic nucleic acid scaffold modification
  source 1..22: mol_type = other RNA
ttgccnctgcccaatgccatcc

SEQ ID NO: 3895 - RNA, 22 nt, synthetic construct
  modified_base 1..2: mod_base = OTHER; note = thymine
  misc_feature 1..22: note = Antisense oligonucleotide
  modified_base 1..2: mod_base = OTHER; note = misc_feature - bicyclic nucleic acid scaffold modification
  modified_base 6: mod_base = OTHER; note = misc_feature - n is inosine, often denoted as i
  modified_base 16: mod_base = OTHER; note = misc_feature - bicyclic nucleic acid scaffold modification
  modified_base 21..22: mod_base = OTHER; note = misc_feature - bicyclic nucleic acid scaffold modification
  source 1..22: mol_type = other RNA
ttgccnctgcccaatgccatcc

SEQ ID NO: 3896 - RNA, 22 nt, synthetic construct
  modified_base 1..2: mod_base = OTHER; note = thymine
  misc_feature 1..22: note = Antisense oligonucleotide
  modified_base 1..2: mod_base = OTHER; note = misc_feature - bicyclic nucleic acid scaffold modification
  modified_base 6: mod_base = OTHER; note = misc_feature - n is inosine, often denoted as i
  modified_base 9: mod_base = OTHER; note = misc_feature - bicyclic nucleic acid scaffold modification
  modified_base 16: mod_base = OTHER; note = misc_feature - bicyclic nucleic acid scaffold modification
  modified_base 21..22: mod_base = OTHER; note = misc_feature - bicyclic nucleic acid scaffold modification
  source 1..22: mol_type = other RNA
ttgccnctgcccaatgccatcc

SEQ ID NO: 3897 - RNA, 22 nt, synthetic construct
  modified_base 1: mod_base = OTHER; note = thymine
  modified_base 22: mod_base = OTHER; note = thymine
  misc_feature 1..22: note = Antisense oligonucleotide
  modified_base 1: mod_base = OTHER; note = misc_feature - bicyclic nucleic acid scaffold modification
  modified_base 5: mod_base = OTHER; note = misc_feature - n is inosine, often denoted as i
  modified_base 22: mod_base = OTHER; note = misc_feature - bicyclic nucleic acid scaffold modification
  source 1..22: mol_type = other RNA
tgccnctgcccaatgccatcct

SEQ ID NO: 3898 - RNA, 22 nt, synthetic construct
  modified_base 1: mod_base = OTHER; note = thymine
  modified_base 22: mod_base = OTHER; note = thymine
  misc_feature 1..22: note = Antisense oligonucleotide
  modified_base 1..2: mod_base = OTHER; note = misc_feature - bicyclic nucleic acid scaffold modification
  modified_base 5: mod_base = OTHER; note = misc_feature - n is inosine, often denoted as i
  modified_base 22: mod_base = OTHER; note = misc_feature - bicyclic nucleic acid scaffold modification
  source 1..22: mol_type = other RNA
tgccnctgcccaatgccatcct

SEQ ID NO: 3899 - RNA, 22 nt, synthetic construct
  modified_base 1: mod_base = OTHER; note = thymine
  modified_base 22: mod_base = OTHER; note = thymine
  misc_feature 1..22: note = Antisense oligonucleotide
  modified_base 1: mod_base = OTHER; note = misc_feature - bicyclic nucleic acid scaffold modification
  modified_base 5: mod_base = OTHER; note = misc_feature - n is inosine, often denoted as i
  modified_base 8: mod_base = OTHER; note = misc_feature - bicyclic nucleic acid scaffold modification
  modified_base 22: mod_base = OTHER; note = misc_feature - bicyclic nucleic acid scaffold modification
  source 1..22: mol_type = other RNA
tgccnctgcccaatgccatcct

SEQ ID NO: 3900 - RNA, 22 nt, synthetic construct
  modified_base 1: mod_base = OTHER; note = thymine
  modified_base 22: mod_base = OTHER; note = thymine
  misc_feature 1..22: note = Antisense oligonucleotide
  modified_base 1: mod_base = OTHER; note = misc_feature - bicyclic nucleic acid scaffold modification
  modified_base 5: mod_base = OTHER; note = misc_feature - n is inosine, often denoted as i
  modified_base 15: mod_base = OTHER; note = misc_feature - bicyclic nucleic acid scaffold modification
  modified_base 22: mod_base = OTHER; note = misc_feature - bicyclic nucleic acid scaffold modification
  source 1..22: mol_type = other RNA
tgccnctgcccaatgccatcct

SEQ ID NO: 3901 - RNA, 22 nt, synthetic construct
  modified_base 1: mod_base = OTHER; note = thymine
  modified_base 22: mod_base = OTHER; note = thymine
  misc_feature 1..22: note = Antisense oligonucleotide
  modified_base 1: mod_base = OTHER; note = misc_feature - bicyclic nucleic acid scaffold modification
  modified_base 5: mod_base = OTHER; note = misc_feature - n is inosine, often denoted as i
  modified_base 17: mod_base = OTHER; note = misc_feature - bicyclic nucleic acid scaffold modification
  modified_base 22: mod_base = OTHER; note = misc_feature - bicyclic nucleic acid scaffold modification
  source 1..22: mol_type = other RNA
tgccnctgcccaatgccatcct

SEQ ID NO: 3902 - RNA, 22 nt, synthetic construct
  modified_base 1: mod_base = OTHER; note = thymine
  modified_base 22: mod_base = OTHER; note = thymine
  misc_feature 1..22: note = Antisense oligonucleotide
  modified_base 1: mod_base = OTHER; note = misc_feature - bicyclic nucleic acid scaffold modification
  modified_base 5: mod_base = OTHER; note = misc_feature - n is inosine, often denoted as i
  modified_base 11: mod_base = OTHER; note = misc_feature - bicyclic nucleic acid scaffold modification
  modified_base 22: mod_base = OTHER; note = misc_feature - bicyclic nucleic acid scaffold modification
  source 1..22: mol_type = other RNA
tgccnctgcccaatgccatcct

SEQ ID NO: 3903 - RNA, 22 nt, synthetic construct
  modified_base 1: mod_base = OTHER; note = thymine
  modified_base 22: mod_base = OTHER; note = thymine
  misc_feature 1..22: note = Antisense oligonucleotide
  modified_base 1: mod_base = OTHER; note = misc_feature - bicyclic nucleic acid scaffold modification
  modified_base 5: mod_base = OTHER; note = misc_feature - n is inosine, often denoted as i
  modified_base 6: mod_base = OTHER; note = misc_feature - bicyclic nucleic acid scaffold modification
  modified_base 22: mod_base = OTHER; note = misc_feature - bicyclic nucleic acid scaffold modification
  source 1..22: mol_type = other RNA
tgccnctgcccaatgccatcct

SEQ ID NO: 3904 - RNA, 22 nt, synthetic construct
  modified_base 1: mod_base = OTHER; note = thymine
  modified_base 22: mod_base = OTHER; note = thymine
  misc_feature 1..22: note = Antisense oligonucleotide
  modified_base 1..2: mod_base = OTHER; note = misc_feature - bicyclic nucleic acid scaffold modification
  modified_base 5: mod_base = OTHER; note = misc_feature - n is inosine, often denoted as i
  modified_base 8: mod_base = OTHER; note = misc_feature - bicyclic nucleic acid scaffold modification
  modified_base 22: mod_base = OTHER; note = misc_feature - bicyclic nucleic acid scaffold modification
  source 1..22: mol_type = other RNA
tgccnctgcccaatgccatcct

SEQ ID NO: 3905 - RNA, 22 nt, synthetic construct
  modified_base 1: mod_base = OTHER; note = thymine
  modified_base 22: mod_base = OTHER; note = thymine
  misc_feature 1..22: note = Antisense oligonucleotide
  modified_base 1: mod_base = OTHER; note = misc_feature - bicyclic nucleic acid scaffold modification
  modified_base 5: mod_base = OTHER; note = misc_feature - n is inosine, often denoted as i
  modified_base 8: mod_base = OTHER; note = misc_feature - bicyclic nucleic acid scaffold modification
  modified_base 15: mod_base = OTHER; note = misc_feature - bicyclic nucleic acid scaffold modification
  modified_base 22: mod_base = OTHER; note = misc_feature - bicyclic nucleic acid scaffold modification
  source 1..22: mol_type = other RNA
tgccnctgcccaatgccatcct

SEQ ID NO: 3906 - RNA, 22 nt, synthetic construct
  modified_base 1: mod_base = OTHER; note = thymine
  modified_base 22: mod_base = OTHER; note = thymine
  misc_feature 1..22: note = Antisense oligonucleotide
  modified_base 1: mod_base = OTHER; note = misc_feature - bicyclic nucleic acid scaffold modification
  modified_base 5: mod_base = OTHER; note = misc_feature - n is inosine, often denoted as i
  modified_base 11: mod_base = OTHER; note = misc_feature - bicyclic nucleic acid scaffold modification
  modified_base 17: mod_base = OTHER; note = misc_feature - bicyclic nucleic acid scaffold modification
  modified_base 22: mod_base = OTHER; note = misc_feature - bicyclic nucleic acid scaffold modification
  source 1..22: mol_type = other RNA
tgccnctgcccaatgccatcct

SEQ ID NO: 3907 - RNA, 22 nt, synthetic construct
  modified_base 1: mod_base = OTHER; note = thymine
  modified_base 22: mod_base = OTHER; note = thymine
  misc_feature 1..22: note = Antisense oligonucleotide
  modified_base 1: mod_base = OTHER; note = misc_feature - bicyclic nucleic acid scaffold modification
  modified_base 5: mod_base = OTHER; note = misc_feature - n is inosine, often denoted as i
  modified_base 6: mod_base = OTHER; note = misc_feature - bicyclic nucleic acid scaffold modification
  modified_base 11: mod_base = OTHER; note = misc_feature - bicyclic nucleic acid scaffold modification
  modified_base 22: mod_base = OTHER; note = misc_feature - bicyclic nucleic acid scaffold modification
  source 1..22: mol_type = other RNA
tgccnctgcccaatgccatcct

SEQ ID NO: 3908 - RNA, 22 nt, synthetic construct
  modified_base 1: mod_base = OTHER; note = thymine
  modified_base 22: mod_base = OTHER; note = thymine
  misc_feature 1..22: note = Antisense oligonucleotide
  modified_base 1..2: mod_base = OTHER; note = misc_feature - bicyclic nucleic acid scaffold modification
  modified_base 5: mod_base = OTHER; note = misc_feature - n is inosine, often denoted as i
  modified_base 21..22: mod_base = OTHER; note = misc_feature - bicyclic nucleic acid scaffold modification
  source 1..22: mol_type = other RNA
tgccnctgcccaatgccatcct

SEQ ID NO: 3909 - RNA, 22 nt, synthetic construct
  modified_base 1: mod_base = OTHER; note = thymine
  modified_base 22: mod_base = OTHER; note = thymine
  misc_feature 1..22: note = Antisense oligonucleotide
  modified_base 1..2: mod_base = OTHER; note = misc_feature - bicyclic nucleic acid scaffold modification
  modified_base 5: mod_base = OTHER; note = misc_feature - n is inosine, often denoted as i
  modified_base 11: mod_base = OTHER; note = misc_feature - bicyclic nucleic acid scaffold modification
  modified_base 21..22: mod_base = OTHER; note = misc_feature - bicyclic nucleic acid scaffold modification
  source 1..22: mol_type = other RNA
tgccnctgcccaatgccatcct

SEQ ID NO: 3910 - RNA, 20 nt, synthetic construct
  modified_base 1: mod_base = OTHER; note = thymine
  misc_feature 1..20: note = Antisense oligonucleotide
  modified_base 1: mod_base = OTHER; note = misc_feature - bicyclic nucleic acid scaffold modification
  modified_base 7: mod_base = OTHER; note = misc_feature - n is inosine, often denoted as i
  modified_base 20: mod_base = OTHER; note = misc_feature - bicyclic nucleic acid scaffold modification
  source 1..20: mol_type = other RNA
tttgccnctgcccaatgcca

SEQ ID NO: 3911 - RNA, 20 nt, synthetic construct
  modified_base 1: mod_base = OTHER; note = thymine
  misc_feature 1..20: note = Antisense oligonucleotide
  modified_base 1: mod_base = OTHER; note = misc_feature - bicyclic nucleic acid scaffold modification
  modified_base 4: mod_base = OTHER; note = misc_feature - bicyclic nucleic acid scaffold modification
  modified_base 7: mod_base = OTHER; note = misc_feature - n is inosine, often denoted as i
  modified_base 20: mod_base = OTHER; note = misc_feature - bicyclic nucleic acid scaffold modification
  source 1..20: mol_type = other RNA
tttgccnctgcccaatgcca

SEQ ID NO: 3912 - RNA, 20 nt, synthetic construct
  modified_base 1: mod_base = OTHER; note = thymine
  misc_feature 1..20: note = Antisense oligonucleotide
  modified_base 1: mod_base = OTHER; note = misc_feature - bicyclic nucleic acid scaffold modification
  modified_base 7: mod_base = OTHER; note = misc_feature - n is inosine, often denoted as i
  modified_base 10: mod_base = OTHER; note = misc_feature - bicyclic nucleic acid scaffold modification
  modified_base 20: mod_base = OTHER; note = misc_feature - bicyclic nucleic acid scaffold modification
  source 1..20: mol_type = other RNA
tttgccnctgcccaatgcca

SEQ ID NO: 3913 - RNA, 20 nt, synthetic construct
  modified_base 1: mod_base = OTHER; note = thymine
  misc_feature 1..20: note = Antisense oligonucleotide
  modified_base 1: mod_base = OTHER; note = misc_feature - bicyclic nucleic acid scaffold modification
  modified_base 7: mod_base = OTHER; note = misc_feature - n is inosine, often denoted as i
  modified_base 17: mod_base = OTHER; note = misc_feature - bicyclic nucleic acid scaffold modification
  modified_base 20: mod_base = OTHER; note = misc_feature - bicyclic nucleic acid scaffold modification
  source 1..20: mol_type = other RNA
tttgccnctgcccaatgcca

SEQ ID NO: 3914 - RNA, 20 nt, synthetic construct
  modified_base 1: mod_base = OTHER; note = thymine
  misc_feature 1..20: note = Antisense oligonucleotide
  modified_base 1: mod_base = OTHER; note = misc_feature - bicyclic nucleic acid scaffold modification
  modified_base 7: mod_base = OTHER; note = misc_feature - n is inosine, often denoted as i
  modified_base 10: mod_base = OTHER; note = misc_feature - bicyclic nucleic acid scaffold modification
  modified_base 17: mod_base = OTHER; note = misc_feature - bicyclic nucleic acid scaffold modification
  modified_base 20: mod_base = OTHER; note = misc_feature - bicyclic nucleic acid scaffold modification
  source 1..20: mol_type = other RNA
tttgccnctgcccaatgcca

SEQ ID NO: 3915 - RNA, 20 nt, synthetic construct
  modified_base 1: mod_base = OTHER; note = thymine
  misc_feature 1..20: note = Antisense oligonucleotide
  modified_base 1: mod_base = OTHER; note = misc_feature - bicyclic nucleic acid scaffold modification
  modified_base 4: mod_base = OTHER; note = misc_feature - bicyclic nucleic acid scaffold modification
  modified_base 7: mod_base = OTHER; note = misc_feature - n is inosine, often denoted as i
  modified_base 10: mod_base = OTHER; note = misc_feature - bicyclic nucleic acid scaffold modification
  modified_base 20: mod_base = OTHER; note = misc_feature - bicyclic nucleic acid scaffold modification
  source 1..20: mol_type = other RNA
tttgccnctgcccaatgcca

SEQ ID NO: 3916 - RNA, 20 nt, synthetic construct
  modified_base 1: mod_base = OTHER; note = thymine
  misc_feature 1..20: note = Antisense oligonucleotide
  modified_base 1: mod_base = OTHER; note = misc_feature - bicyclic nucleic acid scaffold modification
  modified_base 7: mod_base = OTHER; note = misc_feature - n is inosine, often denoted as i
  modified_base 13: mod_base = OTHER; note = misc_feature - bicyclic nucleic acid scaffold modification
  modified_base 20: mod_base = OTHER; note = misc_feature - bicyclic nucleic acid scaffold modification
  source 1..20: mol_type = other RNA
tttgccnctgcccaatgcca

SEQ ID NO: 3917 - RNA, 20 nt, synthetic construct
  modified_base 1: mod_base = OTHER; note = thymine
  misc_feature 1..20: note = Antisense oligonucleotide
  modified_base 1: mod_base = OTHER; note = misc_feature - bicyclic nucleic acid scaffold modification
  modified_base 7: mod_base = OTHER; note = misc_feature - n is inosine, often denoted as i
  modified_base 8: mod_base = OTHER; note = misc_feature - bicyclic nucleic acid scaffold modification
  modified_base 20: mod_base = OTHER; note = misc_feature - bicyclic nucleic acid scaffold modification
  source 1..20: mol_type = other RNA
tttgccnctgcccaatgcca

SEQ ID NO: 3918 - RNA, 20 nt, synthetic construct
  modified_base 1: mod_base = OTHER; note = thymine
  misc_feature 1..20: note = Antisense oligonucleotide
  modified_base 1: mod_base = OTHER; note = misc_feature - bicyclic nucleic acid scaffold modification
  modified_base 7: mod_base = OTHER; note = misc_feature - n is inosine, often denoted as i
  modified_base 8: mod_base = OTHER; note = misc_feature - bicyclic nucleic acid scaffold modification
  modified_base 13: mod_base = OTHER; note = misc_feature - bicyclic nucleic acid scaffold modification
  modified_base 20: mod_base = OTHER; note = misc_feature - bicyclic nucleic acid scaffold modification
  source 1..20: mol_type = other RNA
tttgccnctgcccaatgcca

SEQ ID NO: 3919 - RNA, 20 nt, synthetic construct
  modified_base 1..2: mod_base = OTHER; note = thymine
  misc_feature 1..20: note = Antisense oligonucleotide
  modified_base 1..2: mod_base = OTHER; note = misc_feature - bicyclic nucleic acid scaffold modification
  modified_base 7: mod_base = OTHER; note = misc_feature - n is inosine, often denoted as i
  modified_base 19..20: mod_base = OTHER; note = misc_feature - bicyclic nucleic acid scaffold modification
  source 1..20: mol_type = other RNA
tttgccnctgcccaatgcca

SEQ ID NO: 3920 - RNA, 20 nt, synthetic construct
  modified_base 1..2: mod_base = OTHER; note = thymine
  misc_feature 1..20: note = Antisense oligonucleotide
  modified_base 1..2: mod_base = OTHER; note = misc_feature - bicyclic nucleic acid scaffold modification
  modified_base 7: mod_base = OTHER; note = misc_feature - n is inosine, often denoted as i
  modified_base 8: mod_base = OTHER; note = misc_feature - bicyclic nucleic acid scaffold modification
  modified_base 13: mod_base = OTHER; note = misc_feature - bicyclic nucleic acid scaffold modification
  modified_base 19..20: mod_base = OTHER; note = misc_feature - bicyclic nucleic acid scaffold modification
  source 1..20: mol_type = other RNA
tttgccnctgcccaatgcca

SEQ ID NO: 3921 - RNA, 20 nt, synthetic construct
  modified_base 1: mod_base = OTHER; note = thymine
  modified_base 20: mod_base = OTHER; note = thymine
  misc_feature 1..20: note = Antisense oligonucleotide
  modified_base 1: mod_base = OTHER; note = misc_feature - bicyclic nucleic acid scaffold modification
  modified_base 6: mod_base = OTHER; note = misc_feature - n is inosine, often denoted as i
  modified_base 20: mod_base = OTHER; note = misc_feature - bicyclic nucleic acid scaffold modification
  source 1..20: mol_type = other RNA
ttgccnctgcccaatgccat

SEQ ID NO: 3922 - RNA, 20 nt, synthetic construct
  modified_base 1: mod_base = OTHER; note = thymine
  modified_base 20: mod_base = OTHER; note = thymine
  misc_feature 1..20: note = Antisense oligonucleotide
  modified_base 1: mod_base = OTHER; note = misc_feature - bicyclic nucleic acid scaffold modification
  modified_base 6: mod_base = OTHER; note = misc_feature - n is inosine, often denoted as i
  modified_base 3: mod_base = OTHER; note = misc_feature - bicyclic nucleic acid scaffold modification
  modified_base 20: mod_base = OTHER; note = misc_feature - bicyclic nucleic acid scaffold modification
  source 1..20: mol_type = other RNA
ttgccnctgcccaatgccat

SEQ ID NO: 3923 - RNA, 20 nt, synthetic construct
  modified_base 1: mod_base = OTHER; note = thymine
  modified_base 20: mod_base = OTHER; note = thymine
  misc_feature 1..20: note = Antisense oligonucleotide
  modified_base 1: mod_base = OTHER; note = misc_feature - bicyclic nucleic acid scaffold modification
  modified_base 6: mod_base = OTHER; note = misc_feature - n is inosine, often denoted as i
  modified_base 9: mod_base = OTHER; note = misc_feature - bicyclic nucleic acid scaffold modification
  modified_base 20: mod_base = OTHER; note = misc_feature - bicyclic nucleic acid scaffold modification
  source 1..20: mol_type = other RNA
ttgccnctgcccaatgccat

SEQ ID NO: 3924 - RNA, 20 nt, synthetic construct
  modified_base 1: mod_base = OTHER; note = thymine
  modified_base 20: mod_base = OTHER; note = thymine
  misc_feature 1..20: note = Antisense oligonucleotide
  modified_base 1: mod_base = OTHER; note = misc_feature - bicyclic nucleic acid scaffold modification
  modified_base 6: mod_base = OTHER; note = misc_feature - n is inosine, often denoted as i
  modified_base 16: mod_base = OTHER; note = misc_feature - bicyclic nucleic acid scaffold modification
  modified_base 20: mod_base = OTHER; note = misc_feature - bicyclic nucleic acid scaffold modification
  source 1..20: mol_type = other RNA
ttgccnctgcccaatgccat

SEQ ID NO: 3925 - RNA, 20 nt, synthetic construct
  modified_base 1: mod_base = OTHER; note = thymine
  modified_base 20: mod_base = OTHER; note = thymine
  misc_feature 1..20: note = Antisense oligonucleotide
  modified_base 1: mod_base = OTHER; note = misc_feature - bicyclic nucleic acid scaffold modification
  modified_base 6: mod_base = OTHER; note = misc_feature - n is inosine, often denoted as i
  modified_base 9: mod_base = OTHER; note = misc_feature - bicyclic nucleic acid scaffold modification
  modified_base 16: mod_base = OTHER; note = misc_feature - bicyclic nucleic acid scaffold modification
  modified_base 20: mod_base = OTHER; note = misc_feature - bicyclic nucleic acid scaffold modification
  source 1..20: mol_type = other RNA
ttgccnctgcccaatgccat

SEQ ID NO: 3926 - RNA, 20 nt, synthetic construct
  modified_base 1: mod_base = OTHER; note = thymine
  modified_base 20: mod_base = OTHER; note = thymine
  misc_feature 1..20: note = Antisense oligonucleotide
  modified_base 1: mod_base = OTHER; note = misc_feature - bicyclic nucleic acid scaffold modification
  modified_base 3: mod_base = OTHER; note = misc_feature - bicyclic nucleic acid scaffold modification
  modified_base 6: mod_base = OTHER; note = misc_feature - n is inosine, often denoted as i
  modified_base 9: mod_base = OTHER; note = misc_feature - bicyclic nucleic acid scaffold modification
  modified_base 20: mod_base = OTHER; note = misc_feature - bicyclic nucleic acid scaffold modification
  source 1..20: mol_type = other RNA
ttgccnctgcccaatgccat

SEQ ID NO: 3927 - RNA, 20 nt, synthetic construct
  modified_base 1: mod_base = OTHER; note = thymine
  modified_base 20: mod_base = OTHER; note = thymine
  misc_feature 1..20: note = Antisense oligonucleotide
  modified_base 1: mod_base = OTHER; note = misc_feature - bicyclic nucleic acid scaffold modification
  modified_base 6: mod_base = OTHER; note = misc_feature - n is inosine, often denoted as i
  modified_base 18: mod_base = OTHER; note = misc_feature - bicyclic nucleic acid scaffold modification
  modified_base 20: mod_base = OTHER; note = misc_feature - bicyclic nucleic acid scaffold modification
  source 1..20: mol_type = other RNA
ttgccnctgcccaatgccat

SEQ ID NO: 3928 - RNA, 20 nt, synthetic construct
  modified_base 1: mod_base = OTHER; note = thymine
  modified_base 20: mod_base = OTHER; note = thymine
  misc_feature 1..20: note = Antisense oligonucleotide
  modified_base 1: mod_base = OTHER; note = misc_feature - bicyclic nucleic acid scaffold modification
  modified_base 6: mod_base = OTHER; note = misc_feature - n is inosine, often denoted as i
  modified_base 12: mod_base = OTHER; note = misc_feature - bicyclic nucleic acid scaffold modification
  modified_base 20: mod_base = OTHER; note = misc_feature - bicyclic nucleic acid scaffold modification
  source 1..20: mol_type = other RNA
ttgccnctgcccaatgccat

SEQ ID NO: 3929 - RNA, 20 nt, synthetic construct
  modified_base 1: mod_base = OTHER; note = thymine
  modified_base 20: mod_base = OTHER; note = thymine
  misc_feature 1..20: note = Antisense oligonucleotide
  modified_base 1: mod_base = OTHER; note = misc_feature - bicyclic nucleic acid scaffold modification
  modified_base 6: mod_base = OTHER; note = misc_feature - n is inosine, often denoted as i
  modified_base 7: mod_base = OTHER; note = misc_feature - bicyclic nucleic acid scaffold modification
  modified_base 20: mod_base = OTHER; note = misc_feature - bicyclic nucleic acid scaffold modification
  source 1..20: mol_type = other RNA
ttgccnctgcccaatgccat

SEQ ID NO: 3930 - RNA, 20 nt, synthetic construct
  modified_base 1: mod_base = OTHER; note = thymine
  modified_base 20: mod_base = OTHER; note = thymine
  misc_feature 1..20: note = Antisense oligonucleotide
  modified_base 1: mod_base = OTHER; note = misc_feature - bicyclic nucleic acid scaffold modification
  modified_base 6: mod_base = OTHER; note = misc_feature - n is inosine, often denoted as i
  modified_base 12: mod_base = OTHER; note = misc_feature - bicyclic nucleic acid scaffold modification
  modified_base 18: mod_base = OTHER; note = misc_feature - bicyclic nucleic acid scaffold modification
  modified_base 20: mod_base = OTHER; note = misc_feature - bicyclic nucleic acid scaffold modification
  source 1..20: mol_type = other RNA
ttgccnctgcccaatgccat

SEQ ID NO: 3931 - RNA, 20 nt, synthetic construct
  modified_base 1: mod_base = OTHER; note = thymine
  modified_base 20: mod_base = OTHER; note = thymine
  misc_feature 1..20: note = Antisense oligonucleotide
  modified_base 1: mod_base = OTHER; note = misc_feature - bicyclic nucleic acid scaffold modification
  modified_base 6: mod_base = OTHER; note = misc_feature - n is inosine, often denoted as i
  modified_base 7: mod_base = OTHER; note = misc_feature - bicyclic nucleic acid scaffold modification
  modified_base 12: mod_base = OTHER; note = misc_feature - bicyclic nucleic acid scaffold modification
  modified_base 20: mod_base = OTHER; note = misc_feature - bicyclic nucleic acid scaffold modification
  source 1..20: mol_type = other RNA
ttgccnctgcccaatgccat

SEQ ID NO: 3932 - RNA, 20 nt, synthetic construct
  modified_base 1..2: mod_base = OTHER; note = thymine
  modified_base 20: mod_base = OTHER; note = thymine
  misc_feature 1..20: note = Antisense oligonucleotide
  modified_base 1..2: mod_base = OTHER; note = misc_feature - bicyclic nucleic acid scaffold modification
  modified_base 6: mod_base = OTHER; note = misc_feature - n is inosine, often denoted as i
  modified_base 19..20: mod_base = OTHER; note = misc_feature - bicyclic nucleic acid scaffold modification
  source 1..20: mol_type = other RNA
ttgccnctgcccaatgccat

SEQ ID NO: 3933 - RNA, 20 nt, synthetic construct
  modified_base 1..2: mod_base = OTHER; note = thymine
  modified_base 20: mod_base = OTHER; note = thymine
  misc_feature 1..20: note = Antisense oligonucleotide
  modified_base 1..2: mod_base = OTHER; note = misc_feature - bicyclic nucleic acid scaffold modification
  modified_base 6: mod_base = OTHER; note = misc_feature - n is inosine, often denoted as i
  modified_base 12: mod_base = OTHER; note = misc_feature - bicyclic nucleic acid scaffold modification
  modified_base 19..20: mod_base = OTHER; note = misc_feature - bicyclic nucleic acid scaffold modification
  source 1..20: mol_type = other RNA
ttgccnctgcccaatgccat

SEQ ID NO: 3934 - RNA, 20 nt, synthetic construct
  modified_base 1..2: mod_base = OTHER; note = thymine
  modified_base 20: mod_base = OTHER; note = thymine
  misc_feature 1..20: note = Antisense oligonucleotide
  modified_base 1..2: mod_base = OTHER; note = misc_feature - bicyclic nucleic acid scaffold modification
  modified_base 6: mod_base = OTHER; note = misc_feature - n is inosine, often denoted as i
  modified_base 9: mod_base = OTHER; note = misc_feature - bicyclic nucleic acid scaffold modification
  modified_base 19..20: mod_base = OTHER; note = misc_feature - bicyclic nucleic acid scaffold modification
  source 1..20: mol_type = other RNA
ttgccnctgcccaatgccat

SEQ ID NO: 3935 - RNA, 20 nt, synthetic construct
  modified_base 1: mod_base = OTHER; note = thymine
  misc_feature 1..20: note = Antisense oligonucleotide
  modified_base 1: mod_base = OTHER; note = misc_feature - bicyclic nucleic acid scaffold modification
  modified_base 5: mod_base = OTHER; note = misc_feature - n is inosine, often denoted as i
  modified_base 20: mod_base = OTHER; note = misc_feature - bicyclic nucleic acid scaffold modification
  source 1..20: mol_type = other RNA
tgccnctgcccaatgccatc

SEQ ID NO: 3936 - RNA, 20 nt, synthetic construct
  modified_base 1: mod_base = OTHER; note = thymine
  misc_feature 1..20: note = Antisense oligonucleotide
  modified_base 1..2: mod_base = OTHER; note = misc_feature - bicyclic nucleic acid scaffold modification
  modified_base 5: mod_base = OTHER; note = misc_feature - n is inosine, often denoted as i
  modified_base 20: mod_base = OTHER; note = misc_feature - bicyclic nucleic acid scaffold modification
  source 1..20: mol_type = other RNA
tgccnctgcccaatgccatc

SEQ ID NO: 3937 - RNA, 20 nt, synthetic construct
  modified_base 1: mod_base = OTHER; note = thymine
  misc_feature 1..20: note = Antisense oligonucleotide
  modified_base 1: mod_base = OTHER; note = misc_feature - bicyclic nucleic acid scaffold modification
  modified_base 5: mod_base = OTHER; note = misc_feature - n is inosine, often denoted as i
  modified_base 8: mod_base = OTHER; note = misc_feature - bicyclic nucleic acid scaffold modification
  modified_base 20: mod_base = OTHER; note = misc_feature - bicyclic nucleic acid scaffold modification
  source 1..20: mol_type = other RNA
tgccnctgcccaatgccatc

SEQ ID NO: 3938 - RNA, 20 nt, synthetic construct
  modified_base 1: mod_base = OTHER; note = thymine
  misc_feature 1..20: note = Antisense oligonucleotide
  modified_base 1: mod_base = OTHER; note = misc_feature - bicyclic nucleic acid scaffold modification
  modified_base 5: mod_base = OTHER; note = misc_feature - n is inosine, often denoted as i
  modified_base 15: mod_base = OTHER; note = misc_feature - bicyclic nucleic acid scaffold modification
  modified_base 20: mod_base = OTHER; note = misc_feature - bicyclic nucleic acid scaffold modification
  source 1..20: mol_type = other RNA
tgccnctgcccaatgccatc

SEQ ID NO: 3939 - RNA, 20 nt, synthetic construct
  modified_base 1: mod_base = OTHER; note = thymine
  misc_feature 1..20: note = Antisense oligonucleotide
  modified_base 1: mod_base = OTHER; note = misc_feature - bicyclic nucleic acid scaffold modification
  modified_base 5: mod_base = OTHER; note = misc_feature - n is inosine, often denoted as i
  modified_base 8: mod_base = OTHER; note = misc_feature - bicyclic nucleic acid scaffold modification
  modified_base 15: mod_base = OTHER; note = misc_feature - bicyclic nucleic acid scaffold modification
  modified_base 20: mod_base = OTHER; note = misc_feature - bicyclic nucleic acid scaffold modification
  source 1..20: mol_type = other RNA
tgccnctgcccaatgccatc

SEQ ID NO: 3940 - RNA, 20 nt, synthetic construct
  modified_base 1: mod_base = OTHER; note = thymine
  misc_feature 1..20: note = Antisense oligonucleotide
  modified_base 1..2: mod_base = OTHER; note = misc_feature - bicyclic nucleic acid scaffold modification
  modified_base 5: mod_base = OTHER; note = misc_feature - n is inosine, often denoted as i
  modified_base 8: mod_base = OTHER; note = misc_feature - bicyclic nucleic acid scaffold modification
  modified_base 20: mod_base = OTHER; note = misc_feature - bicyclic nucleic acid scaffold modification
  source 1..20: mol_type = other RNA
tgccnctgcccaatgccatc

SEQ ID NO: 3941 - RNA, 20 nt, synthetic construct
  modified_base 1: mod_base = OTHER; note = thymine
  misc_feature 1..20: note = Antisense oligonucleotide
  modified_base 1: mod_base = OTHER; note = misc_feature - bicyclic nucleic acid scaffold modification
  modified_base 5: mod_base = OTHER; note = misc_feature - n is inosine, often denoted as i
  modified_base 17: mod_base = OTHER; note = misc_feature - bicyclic nucleic acid scaffold modification
  modified_base 20: mod_base = OTHER; note = misc_feature - bicyclic nucleic acid scaffold modification
  source 1..20: mol_type = other RNA
tgccnctgcccaatgccatc

SEQ ID NO: 3942 - RNA, 20 nt, synthetic construct
  modified_base 1: mod_base = OTHER; note = thymine
  misc_feature 1..20: note = Antisense oligonucleotide
  modified_base 1: mod_base = OTHER; note = misc_feature - bicyclic nucleic acid scaffold modification
  modified_base 5: mod_base = OTHER; note = misc_feature - n is inosine, often denoted as i
  modified_base 11: mod_base = OTHER; note = misc_feature - bicyclic nucleic acid scaffold modification
  modified_base 20: mod_base = OTHER; note = misc_feature - bicyclic nucleic acid scaffold modification
  source 1..20: mol_type = other RNA
tgccnctgcccaatgccatc

SEQ ID NO: 3943 - RNA, 20 nt, synthetic construct
  modified_base 1: mod_base = OTHER; note = thymine
  misc_feature 1..20: note = Antisense oligonucleotide
  modified_base 1: mod_base = OTHER; note = misc_feature - bicyclic nucleic acid scaffold modification
  modified_base 5: mod_base = OTHER; note = misc_feature - n is inosine, often denoted as i
  modified_base 6: mod_base = OTHER; note = misc_feature - bicyclic nucleic acid scaffold modification
  modified_base 20: mod_base = OTHER; note = misc_feature - bicyclic nucleic acid scaffold modification
  source 1..20: mol_type = other RNA
tgccnctgcccaatgccatc

SEQ ID NO: 3944 - RNA, 20 nt, synthetic construct
  modified_base 1: mod_base = OTHER; note = thymine
  misc_feature 1..20: note = Antisense oligonucleotide
  modified_base 1: mod_base = OTHER; note = misc_feature - bicyclic nucleic acid scaffold modification
  modified_base 5: mod_base = OTHER; note = misc_feature - n is inosine, often denoted as i
  modified_base 11: mod_base = OTHER; note = misc_feature - bicyclic nucleic acid scaffold modification
  modified_base 17: mod_base = OTHER; note = misc_feature - bicyclic nucleic acid scaffold modification
  modified_base 20: mod_base = OTHER; note = misc_feature - bicyclic nucleic acid scaffold modification
  source 1..20: mol_type = other RNA
tgccnctgcccaatgccatc

SEQ ID NO: 3945 - RNA, 20 nt, synthetic construct
  modified_base 1: mod_base = OTHER; note = thymine
  misc_feature 1..20: note = Antisense oligonucleotide
  modified_base 1: mod_base = OTHER; note = misc_feature - bicyclic nucleic acid scaffold modification
  modified_base 5: mod_base = OTHER; note = misc_feature - n is inosine, often denoted as i
  modified_base 6: mod_base = OTHER; note = misc_feature - bicyclic nucleic acid scaffold modification
  modified_base 11: mod_base = OTHER; note = misc_feature - bicyclic nucleic acid scaffold modification
  modified_base 20: mod_base = OTHER; note = misc_feature - bicyclic nucleic acid scaffold modification
  source 1..20: mol_type = other RNA
tgccnctgcccaatgccatc

SEQ ID NO: 3946 - RNA, 20 nt, synthetic construct
  modified_base 1: mod_base = OTHER; note = thymine
  modified_base 19: mod_base = OTHER; note = thymine
  misc_feature 1..20: note = Antisense oligonucleotide
  modified_base 1..2: mod_base = OTHER; note = misc_feature - bicyclic nucleic acid scaffold modification
  modified_base 5: mod_base = OTHER; note = misc_feature - n is inosine, often denoted as i
  modified_base 19..20: mod_base = OTHER; note = misc_feature - bicyclic nucleic acid scaffold modification
  source 1..20: mol_type = other RNA
tgccnctgcccaatgccatc

SEQ ID NO: 3947 - RNA, 20 nt, synthetic construct
  modified_base 1: mod_base = OTHER; note = thymine
  modified_base 19: mod_base = OTHER; note = thymine
  misc_feature 1..20: note = Antisense oligonucleotide
  modified_base 1..2: mod_base = OTHER; note = misc_feature - bicyclic nucleic acid scaffold modification
  modified_base 5: mod_base = OTHER; note = misc_feature - n is inosine, often denoted as i
  modified_base 8: mod_base = OTHER; note = misc_feature - bicyclic nucleic acid scaffold modification
  modified_base 15: mod_base = OTHER; note = misc_feature - bicyclic nucleic acid scaffold modification
  modified_base 19..20: mod_base = OTHER; note = misc_feature - bicyclic nucleic acid scaffold modification
  source 1..20: mol_type = other RNA
tgccnctgcccaatgccatc

SEQ ID NO: 3948 - RNA, 20 nt, synthetic construct
  modified_base 1: mod_base = OTHER; note = thymine
  modified_base 19: mod_base = OTHER; note = thymine
  misc_feature 1..20: note = Antisense oligonucleotide
  modified_base 1..2: mod_base = OTHER; note = misc_feature - bicyclic nucleic acid scaffold modification
  modified_base 5: mod_base = OTHER; note = misc_feature - n is inosine, often denoted as i
  modified_base 6: mod_base = OTHER; note = misc_feature - bicyclic nucleic acid scaffold modification
  modified_base 11: mod_base = OTHER; note = misc_feature - bicyclic nucleic acid scaffold modification
  modified_base 19..20: mod_base = OTHER; note = misc_feature - bicyclic nucleic acid scaffold modification
  source 1..20: mol_type = other RNA
tgccnctgcccaatgccatc

SEQ ID NO: 3949 - RNA, 20 nt, synthetic construct
  misc_feature 1..20: note = Antisense oligonucleotide
  modified_base 1: mod_base = OTHER; note = misc_feature - bicyclic nucleic acid scaffold modification
  modified_base 4: mod_base = OTHER; note = misc_feature - n is inosine, often denoted as i
  modified_base 20: mod_base = OTHER; note = misc_feature - bicyclic nucleic acid scaffold modification
  source 1..20: mol_type = other RNA
gccnctgcccaatgccatcc

SEQ ID NO: 3950 - RNA, 20 nt, synthetic construct
  misc_feature 1..20: note = Antisense oligonucleotide
  modified_base 1: mod_base = OTHER; note = misc_feature - bicyclic nucleic acid scaffold modification
  modified_base 4: mod_base = OTHER; note = misc_feature - n is inosine, often denoted as i
  modified_base 7: mod_base = OTHER; note = misc_feature - bicyclic nucleic acid scaffold modification
  modified_base 20: mod_base = OTHER; note = misc_feature - bicyclic nucleic acid scaffold modification
  source 1..20: mol_type = other RNA
gccnctgcccaatgccatcc

SEQ ID NO: 3951 - RNA, 20 nt, synthetic construct
  misc_feature 1..20: note = Antisense oligonucleotide
  modified_base 1: mod_base = OTHER; note = misc_feature - bicyclic nucleic acid scaffold modification
  modified_base 4: mod_base = OTHER; note = misc_feature - n is inosine, often denoted as i
  modified_base 14: mod_base = OTHER; note = misc_feature - bicyclic nucleic acid scaffold modification
  modified_base 20: mod_base = OTHER; note = misc_feature - bicyclic nucleic acid scaffold modification
  source 1..20: mol_type = other RNA
gccnctgcccaatgccatcc

SEQ ID NO: 3952 - RNA, 20 nt, synthetic construct
  misc_feature 1..20: note = Antisense oligonucleotide
  modified_base 1: mod_base = OTHER; note = misc_feature - bicyclic nucleic acid scaffold modification
  modified_base 4: mod_base = OTHER; note = misc_feature - n is inosine, often denoted as i
  modified_base 7: mod_base = OTHER; note = misc_feature - bicyclic nucleic acid scaffold modification
  modified_base 14: mod_base = OTHER; note = misc_feature - bicyclic nucleic acid scaffold modification
  modified_base 20: mod_base = OTHER; note = misc_feature - bicyclic nucleic acid scaffold modification
  source 1..20: mol_type = other RNA
gccnctgcccaatgccatcc

SEQ ID NO: 3953 - RNA, 20 nt, synthetic construct
  misc_feature 1..20: note = Antisense oligonucleotide
  modified_base 1: mod_base = OTHER; note = misc_feature - bicyclic nucleic acid scaffold modification
  modified_base 4: mod_base = OTHER; note = misc_feature - n is inosine, often denoted as i
  modified_base 10: mod_base = OTHER; note = misc_feature - bicyclic nucleic acid scaffold modification
  modified_base 16: mod_base = OTHER; note = misc_feature - bicyclic nucleic acid scaffold modification
  modified_base 20: mod_base = OTHER; note = misc_feature - bicyclic nucleic acid scaffold modification
  source 1..20: mol_type = other RNA
gccnctgcccaatgccatcc

SEQ ID NO: 3954 - RNA, 20 nt, synthetic construct
  misc_feature 1..20: note = Antisense oligonucleotide
  modified_base 1: mod_base = OTHER; note = misc_feature - bicyclic nucleic acid scaffold modification
  modified_base 4: mod_base = OTHER; note = misc_feature - n is inosine, often denoted as i
  modified_base 16: mod_base = OTHER; note = misc_feature - bicyclic nucleic acid scaffold modification
  modified_base 20: mod_base = OTHER; note = misc_feature - bicyclic nucleic acid scaffold modification
  source 1..20: mol_type = other RNA
gccnctgcccaatgccatcc

SEQ ID NO: 3955 - RNA, 20 nt, synthetic construct
  misc_feature 1..20: note = Antisense oligonucleotide
  modified_base 1: mod_base = OTHER; note = misc_feature - bicyclic nucleic acid scaffold modification
  modified_base 4: mod_base = OTHER; note = misc_feature - n is inosine, often denoted as i
  modified_base 10: mod_base = OTHER; note = misc_feature - bicyclic nucleic acid scaffold modification
  modified_base 20: mod_base = OTHER; note = misc_feature - bicyclic nucleic acid scaffold modification
  source 1..20: mol_type = other RNA
gccnctgcccaatgccatcc

SEQ ID NO: 3956 - RNA, 20 nt, synthetic construct
  misc_feature 1..20: note = Antisense oligonucleotide
  modified_base 1: mod_base = OTHER; note = misc_feature - bicyclic nucleic acid scaffold modification
  modified_base 4: mod_base = OTHER; note = misc_feature - n is inosine, often denoted as i
  modified_base 5: mod_base = OTHER; note = misc_feature - bicyclic nucleic acid scaffold modification
  modified_base 20: mod_base = OTHER; note = misc_feature - bicyclic nucleic acid scaffold modification
  source 1..20: mol_type = other RNA
gccnctgcccaatgccatcc

SEQ ID NO: 3957 - RNA, 20 nt, synthetic construct
  misc_feature 1..20: note = Antisense oligonucleotide
  modified_base 1: mod_base = OTHER; note = misc_feature - bicyclic nucleic acid scaffold modification
  modified_base 4: mod_base = OTHER; note = misc_feature - n is inosine, often denoted as i
  modified_base 5: mod_base = OTHER; note = misc_feature - bicyclic nucleic acid scaffold modification
  modified_base 10: mod_base = OTHER; note = misc_feature - bicyclic nucleic acid scaffold modification
  modified_base 20: mod_base = OTHER; note = misc_feature - bicyclic nucleic acid scaffold modification
  source 1..20: mol_type = other RNA
gccnctgcccaatgccatcc

SEQ ID NO: 3958 - RNA, 20 nt, synthetic construct
  misc_feature 1..20: note = Antisense oligonucleotide
  modified_base 1: mod_base = OTHER; note = misc_feature - bicyclic nucleic acid scaffold modification
  modified_base 4: mod_base = OTHER; note = misc_feature - n is inosine, often denoted as i
  modified_base 10: mod_base = OTHER; note = misc_feature - bicyclic nucleic acid scaffold modification
  modified_base 16: mod_base = OTHER; note = misc_feature - bicyclic nucleic acid scaffold modification
  modified_base 20: mod_base = OTHER; note = misc_feature - bicyclic nucleic acid scaffold modification
  source 1..20: mol_type = other RNA
gccnctgcccaatgccatcc

SEQ ID NO: 3959 - RNA, 20 nt, synthetic construct
  misc_feature 1..20: note = Antisense oligonucleotide
  modified_base 1: mod_base = OTHER; note = misc_feature - bicyclic nucleic acid scaffold modification
  modified_base 4: mod_base = OTHER; note = misc_feature - n is inosine, often denoted as i
  modified_base 20: mod_base = OTHER; note = misc_feature - bicyclic nucleic acid scaffold modification
  source 1..20: mol_type = other RNA
gccnctgcccaatgccatcc

SEQ ID NO: 3960 - RNA, 20 nt, synthetic construct
  misc_feature 1..20: note = Antisense oligonucleotide
  modified_base 1..2: mod_base = OTHER; note = misc_feature - bicyclic nucleic acid scaffold modification
  modified_base 4: mod_base = OTHER; note = misc_feature - n is inosine, often denoted as i
  modified_base 19..20: mod_base = OTHER; note = misc_feature - bicyclic nucleic acid scaffold modification
  source 1..20: mol_type = other RNA
gccnctgcccaatgccatcc

SEQ ID NO: 3961 - RNA, 20 nt, synthetic construct
  misc_feature 1..20: note = Antisense oligonucleotide
  modified_base 1..2: mod_base = OTHER; note = misc_feature - bicyclic nucleic acid scaffold modification
  modified_base 4: mod_base = OTHER; note = misc_feature - n is inosine, often denoted as i
  modified_base 7: mod_base = OTHER; note = misc_feature - bicyclic nucleic acid scaffold modification
  modified_base 14: mod_base = OTHER; note = misc_feature - bicyclic nucleic acid scaffold modification
  modified_base 19..20: mod_base = OTHER; note = misc_feature - bicyclic nucleic acid scaffold modification
  source 1..20: mol_type = other RNA
gccnctgcccaatgccatcc

SEQ ID NO: 3962 - RNA, 20 nt, synthetic construct
  misc_feature 1..20: note = Antisense oligonucleotide
  modified_base 1..2: mod_base = OTHER; note = misc_feature - bicyclic nucleic acid scaffold modification
  modified_base 4: mod_base = OTHER; note = misc_feature - n is inosine, often denoted as i
  modified_base 10: mod_base = OTHER; note = misc_feature - bicyclic nucleic acid scaffold modification
  modified_base 16: mod_base = OTHER; note = misc_feature - bicyclic nucleic acid scaffold modification
  modified_base 19..20: mod_base = OTHER; note = misc_feature - bicyclic nucleic acid scaffold modification
  source 1..20: mol_type = other RNA
gccnctgcccaatgccatcc

SEQ ID NO: 3963 - RNA, 20 nt, synthetic construct
  modified_base 20: mod_base = OTHER; note = thymine
  misc_feature 1..20: note = Antisense oligonucleotide
  modified_base 1: mod_base = OTHER; note = misc_feature - bicyclic nucleic acid scaffold modification
  modified_base 3: mod_base = OTHER; note = misc_feature - n is inosine, often denoted as i
  modified_base 20: mod_base = OTHER; note = misc_feature - bicyclic nucleic acid scaffold modification
  source 1..20: mol_type = other RNA
ccnctgcccaatgccatcct

SEQ ID NO: 3964 - RNA, 20 nt, synthetic construct
  modified_base 20: mod_base = OTHER; note = thymine
  misc_feature 1..20: note = Antisense oligonucleotide
  modified_base 1: mod_base = OTHER; note = misc_feature - bicyclic nucleic acid scaffold modification
  modified_base 3: mod_base = OTHER; note = misc_feature - n is inosine, often denoted as i
  modified_base 6: mod_base = OTHER; note = misc_feature - bicyclic nucleic acid scaffold modification
  modified_base 20: mod_base = OTHER; note = misc_feature - bicyclic nucleic acid scaffold modification
  source 1..20: mol_type = other RNA
ccnctgcccaatgccatcct

SEQ ID NO: 3965 - RNA, 20 nt, synthetic construct
  modified_base 20: mod_base = OTHER; note = thymine
  misc_feature 1..20: note = Antisense oligonucleotide
  modified_base 1: mod_base = OTHER; note = misc_feature - bicyclic nucleic acid scaffold modification
  modified_base 3: mod_base = OTHER; note = misc_feature - n is inosine, often denoted as i
  modified_base 13: mod_base = OTHER; note = misc_feature - bicyclic nucleic acid scaffold modification
  modified_base 20: mod_base = OTHER; note = misc_feature - bicyclic nucleic acid scaffold modification
  source 1..20: mol_type = other RNA
ccnctgcccaatgccatcct

SEQ ID NO: 3966 - RNA, 20 nt, synthetic construct
  modified_base 20: mod_base = OTHER; note = thymine
  misc_feature 1..20: note = Antisense oligonucleotide
  modified_base 1: mod_base = OTHER; note = misc_feature - bicyclic nucleic acid scaffold modification
  modified_base 3: mod_base = OTHER; note = misc_feature - n is inosine, often denoted as i
  modified_base 6: mod_base = OTHER; note = misc_feature - bicyclic nucleic acid scaffold modification
  modified_base 13: mod_base = OTHER; note = misc_feature - bicyclic nucleic acid scaffold modification
  modified_base 20: mod_base = OTHER; note = misc_feature - bicyclic nucleic acid scaffold modification
  source 1..20: mol_type = other RNA
ccnctgcccaatgccatcct

SEQ ID NO: 3967 - RNA, 20 nt, synthetic construct
  modified_base 20: mod_base = OTHER; note = thymine
  misc_feature 1..20: note = Antisense oligonucleotide
  modified_base 1: mod_base = OTHER; note = misc_feature - bicyclic nucleic acid scaffold modification
  modified_base 3: mod_base = OTHER; note = misc_feature - n is inosine, often denoted as i
  modified_base 18: mod_base = OTHER; note = misc_feature - bicyclic nucleic acid scaffold modification
  modified_base 20: mod_base = OTHER; note = misc_feature - bicyclic nucleic acid scaffold modification
  source 1..20: mol_type = other RNA
ccnctgcccaatgccatcct

SEQ ID NO: 3968 - RNA, 20 nt, synthetic construct
  modified_base 20: mod_base = OTHER; note = thymine
  misc_feature 1..20: note = Antisense oligonucleotide
  modified_base 1: mod_base = OTHER; note = misc_feature - bicyclic nucleic acid scaffold modification
  modified_base 3: mod_base = OTHER; note = misc_feature - n is inosine, often denoted as i
  modified_base 15: mod_base = OTHER; note = misc_feature - bicyclic nucleic acid scaffold modification
  modified_base 20: mod_base = OTHER; note = misc_feature - bicyclic nucleic acid scaffold modification
  source 1..20: mol_type = other RNA
ccnctgcccaatgccatcct

SEQ ID NO: 3969 - RNA, 20 nt, synthetic construct
  modified_base 20: mod_base = OTHER; note = thymine
  misc_feature 1..20: note = Antisense oligonucleotide
  modified_base 1: mod_base = OTHER; note = misc_feature - bicyclic nucleic acid scaffold modification
  modified_base 3: mod_base = OTHER; note = misc_feature - n is inosine, often denoted as i
  modified_base 9: mod_base = OTHER; note = misc_feature - bicyclic nucleic acid scaffold modification
  modified_base 20: mod_base = OTHER; note = misc_feature - bicyclic nucleic acid scaffold modification
  source 1..20: mol_type = other RNA
ccnctgcccaatgccatcct

SEQ ID NO: 3970 - RNA, 20 nt, synthetic construct
  modified_base 20: mod_base = OTHER; note = thymine
  misc_feature 1..20: note = Antisense oligonucleotide
  modified_base 1: mod_base = OTHER; note = misc_feature - bicyclic nucleic acid scaffold modification
  modified_base 3: mod_base = OTHER; note = misc_feature - n is inosine, often denoted as i
  modified_base 4: mod_base = OTHER; note = misc_feature - bicyclic nucleic acid scaffold modification
  modified_base 20: mod_base = OTHER; note = misc_feature - bicyclic nucleic acid scaffold modification
  source 1..20: mol_type = other RNA
ccnctgcccaatgccatcct

SEQ ID NO: 3971 - RNA, 20 nt, synthetic construct
  modified_base 20: mod_base = OTHER; note = thymine
  misc_feature 1..20: note = Antisense oligonucleotide
  modified_base 1: mod_base = OTHER; note = misc_feature - bicyclic nucleic acid scaffold modification
  modified_base 3: mod_base = OTHER; note = misc_feature - n is inosine, often denoted as i
  modified_base 9: mod_base = OTHER; note = misc_feature - bicyclic nucleic acid scaffold modification
  modified_base 15: mod_base = OTHER; note = misc_feature - bicyclic nucleic acid scaffold modification
  modified_base 20: mod_base = OTHER; note = misc_feature - bicyclic nucleic acid scaffold modification
  source 1..20: mol_type = other RNA
ccnctgcccaatgccatcct

SEQ ID NO: 3972 - RNA, 20 nt, synthetic construct
  modified_base 20: mod_base = OTHER; note = thymine
  misc_feature 1..20: note = Antisense oligonucleotide
  modified_base 1: mod_base = OTHER; note = misc_feature - bicyclic nucleic acid scaffold modification
  modified_base 3: mod_base = OTHER; note = misc_feature - n is inosine, often denoted as i
  modified_base 4: mod_base = OTHER; note = misc_feature - bicyclic nucleic acid scaffold modification
  modified_base 9: mod_base = OTHER; note = misc_feature - bicyclic nucleic acid scaffold modification
  modified_base 20: mod_base = OTHER; note = misc_feature - bicyclic nucleic acid scaffold modification
  source 1..20: mol_type = other RNA
ccnctgcccaatgccatcct

SEQ ID NO: 3973 - RNA, 20 nt, synthetic construct
  modified_base 20: mod_base = OTHER; note = thymine
  misc_feature 1..20: note = Antisense oligonucleotide
  modified_base 1..2: mod_base = OTHER; note = misc_feature - bicyclic nucleic acid scaffold modification
  modified_base 3: mod_base = OTHER; note = misc_feature - n is inosine, often denoted as i
  modified_base 19..20: mod_base = OTHER; note = misc_feature - bicyclic nucleic acid scaffold modification
  source 1..20: mol_type = other RNA
ccnctgcccaatgccatcct

SEQ ID NO: 3974 - RNA, 20 nt, synthetic construct
  modified_base 20: mod_base = OTHER; note = thymine
  misc_feature 1..20: note = Antisense oligonucleotide
  modified_base 1..2: mod_base = OTHER; note = misc_feature - bicyclic nucleic acid scaffold modification
  modified_base 3: mod_base = OTHER; note = misc_feature - n is inosine, often denoted as i
  modified_base 13: mod_base = OTHER; note = misc_feature - bicyclic nucleic acid scaffold modification
  modified_base 19..20: mod_base = OTHER; note = misc_feature - bicyclic nucleic acid scaffold modification
  source 1..20: mol_type = other RNA
ccnctgcccaatgccatcct

SEQ ID NO: 3975 - RNA, 20 nt, synthetic construct
  modified_base 20: mod_base = OTHER; note = thymine
  misc_feature 1..20: note = Antisense oligonucleotide
  modified_base 1..2: mod_base = OTHER; note = misc_feature - bicyclic nucleic acid scaffold modification
  modified_base 3: mod_base = OTHER; note = misc_feature - n is inosine, often denoted as i
  modified_base 6: mod_base = OTHER; note = misc_feature - bicyclic nucleic acid scaffold modification
  modified_base 19..20: mod_base = OTHER; note = misc_feature - bicyclic nucleic acid scaffold modification
  source 1..20: mol_type = other RNA
ccnctgcccaatgccatcct

SEQ ID NO: 3976 - RNA, 20 nt, synthetic construct
  misc_feature 1..20: note = Antisense oligonucleotide
  modified_base 1: mod_base = OTHER; note = misc_feature - bicyclic nucleic acid scaffold modification
  modified_base 2: mod_base = OTHER; note = misc_feature - n is inosine, often denoted as i
  modified_base 20: mod_base = OTHER; note = misc_feature - bicyclic nucleic acid scaffold modification
  source 1..20: mol_type = other RNA
cnctgcccaatgccatcctg

SEQ ID NO: 3977 - RNA, 20 nt, synthetic construct
  misc_feature 1..20: note = Antisense oligonucleotide
  modified_base 1: mod_base = OTHER; note = misc_feature - bicyclic nucleic acid scaffold modification
  modified_base 2: mod_base = OTHER; note = misc_feature - n is inosine, often denoted as i
  modified_base 5: mod_base = OTHER; note = misc_feature - bicyclic nucleic acid scaffold modification
  modified_base 20: mod_base = OTHER; note = misc_feature - bicyclic nucleic acid scaffold modification
  source 1..20: mol_type = other RNA
cnctgcccaatgccatcctg

SEQ ID NO: 3978 - RNA, 20 nt, synthetic construct
  misc_feature 1..20: note = Antisense oligonucleotide
  modified_base 1: mod_base = OTHER; note = misc_feature - bicyclic nucleic acid scaffold modification
  modified_base 2: mod_base = OTHER; note = misc_feature - n is inosine, often denoted as i
  modified_base 12: mod_base = OTHER; note = misc_feature - bicyclic nucleic acid scaffold modification
  modified_base 20: mod_base = OTHER; note = misc_feature - bicyclic nucleic acid scaffold modification
  source 1..20: mol_type = other RNA
cnctgcccaatgccatcctg

SEQ ID NO: 3979 - RNA, 20 nt, synthetic construct
  misc_feature 1..20: note = Antisense oligonucleotide
  modified_base 1: mod_base = OTHER; note = misc_feature - bicyclic nucleic acid scaffold modification
  modified_base 2: mod_base = OTHER; note = misc_feature - n is inosine, often denoted as i
  modified_base 5: mod_base = OTHER; note = misc_feature - bicyclic nucleic acid scaffold modification
  modified_base 12: mod_base = OTHER; note = misc_feature - bicyclic nucleic acid scaffold modification
  modified_base 20: mod_base = OTHER; note = misc_feature - bicyclic nucleic acid scaffold modification
  source 1..20: mol_type = other RNA
cnctgcccaatgccatcctg

SEQ ID NO: 3980 - RNA, 20 nt, synthetic construct
  misc_feature 1..20: note = Antisense oligonucleotide
  modified_base 1: mod_base = OTHER; note = misc_feature - bicyclic nucleic acid scaffold modification
  modified_base 2: mod_base = OTHER; note = misc_feature - n is inosine, often denoted as i
  modified_base 18: mod_base = OTHER; note = misc_feature - bicyclic nucleic acid scaffold modification
  modified_base 20: mod_base = OTHER; note = misc_feature - bicyclic nucleic acid scaffold modification
  source 1..20: mol_type = other RNA
cnctgcccaatgccatcctg

SEQ ID NO: 3981 - RNA, 20 nt, synthetic construct
  misc_feature 1..20: note = Antisense oligonucleotide
  modified_base 1: mod_base = OTHER; note = misc_feature - bicyclic nucleic acid scaffold modification
  modified_base 2: mod_base = OTHER; note = misc_feature - n is inosine, often denoted as i
  modified_base 14: mod_base = OTHER; note = misc_feature - bicyclic nucleic acid scaffold modification
  modified_base 20: mod_base = OTHER; note = misc_feature - bicyclic nucleic acid scaffold modification
  source 1..20: mol_type = other RNA
cnctgcccaatgccatcctg

SEQ ID NO: 3982 - RNA, 20 nt, synthetic construct
  misc_feature 1..20: note = Antisense oligonucleotide
  modified_base 1: mod_base = OTHER; note = misc_feature - bicyclic nucleic acid scaffold modification
  modified_base 2: mod_base = OTHER; note = misc_feature - n is inosine, often denoted as i
  modified_base 8: mod_base = OTHER; note = misc_feature - bicyclic nucleic acid scaffold modification
  modified_base 20: mod_base = OTHER; note = misc_feature - bicyclic nucleic acid scaffold modification
  source 1..20: mol_type = other RNA
cnctgcccaatgccatcctg

SEQ ID NO: 3983 - RNA, 20 nt, synthetic construct
  misc_feature 1..20: note = Antisense oligonucleotide
  modified_base 1: mod_base = OTHER; note = misc_feature - bicyclic nucleic acid scaffold modification
  modified_base 2: mod_base = OTHER; note = misc_feature - n is inosine, often denoted as i
  modified_base 3: mod_base = OTHER; note = misc_feature - bicyclic nucleic acid scaffold modification
  modified_base 20: mod_base = OTHER; note = misc_feature - bicyclic nucleic acid scaffold modification
  source 1..20: mol_type = other RNA
cnctgcccaatgccatcctg

SEQ ID NO: 3984 - RNA, 20 nt, synthetic construct
  misc_feature 1..20: note = Antisense oligonucleotide
  modified_base 1: mod_base = OTHER; note = misc_feature - bicyclic nucleic acid scaffold modification
  modified_base 2: mod_base = OTHER; note = misc_feature - n is inosine, often denoted as i
  modified_base 8: mod_base = OTHER; note = misc_feature - bicyclic nucleic acid scaffold modification
  modified_base 14: mod_base = OTHER; note = misc_feature - bicyclic nucleic acid scaffold modification
  modified_base 20: mod_base = OTHER; note = misc_feature - bicyclic nucleic acid scaffold modification
  source 1..20: mol_type = other RNA
cnctgcccaatgccatcctg

SEQ ID NO: 3985 - RNA, 20 nt, synthetic construct
  misc_feature 1..20: note = Antisense oligonucleotide
  modified_base 1: mod_base = OTHER; note = misc_feature - bicyclic nucleic acid scaffold modification
  modified_base 2: mod_base = OTHER; note = misc_feature - n is inosine, often denoted as i
  modified_base 3: mod_base = OTHER; note = misc_feature - bicyclic nucleic acid scaffold modification
  modified_base 18: mod_base = OTHER; note = misc_feature - bicyclic nucleic acid scaffold modification
  modified_base 20: mod_base = OTHER; note = misc_feature - bicyclic nucleic acid scaffold modification
  source 1..20: mol_type = other RNA
cnctgcccaatgccatcctg

SEQ ID NO: 3986 - RNA, 20 nt, synthetic construct
  modified_base 19: mod_base = OTHER; note = thymine
  misc_feature 1..20: note = Antisense oligonucleotide
  modified_base 1: mod_base = OTHER; note = misc_feature - bicyclic nucleic acid scaffold modification
  modified_base 2: mod_base = OTHER; note = misc_feature - n is inosine, often denoted as i
  modified_base 19..20: mod_base = OTHER; note = misc_feature - bicyclic nucleic acid scaffold modification
  source 1..20: mol_type = other RNA
cnctgcccaatgccatcctg

SEQ ID NO: 3987 - RNA, 20 nt, synthetic construct
  modified_base 19: mod_base = OTHER; note = thymine
  misc_feature 1..20: note = Antisense oligonucleotide
  modified_base 1: mod_base = OTHER; note = misc_feature - bicyclic nucleic acid scaffold modification
  modified_base 2: mod_base = OTHER; note = misc_feature - n is inosine, often denoted as i
  modified_base 12: mod_base = OTHER; note = misc_feature - bicyclic nucleic acid scaffold modification
  modified_base 19..20: mod_base = OTHER; note = misc_feature - bicyclic nucleic acid scaffold modification
  source 1..20: mol_type = other RNA
cnctgcccaatgccatcctg

SEQ ID NO: 3988 - RNA, 20 nt, synthetic construct
  modified_base 19: mod_base = OTHER; note = thymine
  misc_feature 1..20: note = Antisense oligonucleotide
  modified_base 1: mod_base = OTHER; note = misc_feature - bicyclic nucleic acid scaffold modification
  modified_base 2: mod_base = OTHER; note = misc_feature - n is inosine, often denoted as i
  modified_base 5: mod_base = OTHER; note = misc_feature - bicyclic nucleic acid scaffold modification
  modified_base 12: mod_base = OTHER; note = misc_feature - bicyclic nucleic acid scaffold modification
  modified_base 19..20: mod_base = OTHER; note = misc_feature - bicyclic nucleic acid scaffold modification
  source 1..20: mol_type = other RNA
cnctgcccaatgccatcctg

SEQ ID NO: 3989 - RNA, 18 nt, synthetic construct
  modified_base 1: mod_base = OTHER; note = thymine
  misc_feature 1..18: note = Antisense oligonucleotide
  modified_base 1: mod_base = OTHER; note = misc_feature - bicyclic nucleic acid scaffold modification
  modified_base 7: mod_base = OTHER; note = misc_feature - n is inosine, often denoted as i
  modified_base 18: mod_base = OTHER; note = misc_feature - bicyclic nucleic acid scaffold modification
  source 1..18: mol_type = other RNA
tttgccnctgcccaatgc

SEQ ID NO: 3990 - RNA, 18 nt, synthetic construct
  modified_base 1: mod_base = OTHER; note = thymine
  misc_feature 1..18: note = Antisense oligonucleotide
  modified_base 1: mod_base = OTHER; note = misc_feature - bicyclic nucleic acid scaffold modification
  modified_base 4: mod_base = OTHER; note = misc_feature - bicyclic nucleic acid scaffold modification
  modified_base 7: mod_base = OTHER; note = misc_feature - n is inosine, often denoted as i
  modified_base 18: mod_base = OTHER; note = misc_feature - bicyclic nucleic acid scaffold modification
  source 1..18: mol_type = other RNA
tttgccnctgcccaatgc

SEQ ID NO: 3991 - RNA, 18 nt, synthetic construct
  modified_base 1: mod_base = OTHER; note = thymine
  misc_feature 1..18: note = Antisense oligonucleotide
  modified_base 1: mod_base = OTHER; note = misc_feature - bicyclic nucleic acid scaffold modification
  modified_base 7: mod_base = OTHER; note = misc_feature - n is inosine, often denoted as i
  modified_base 10: mod_base = OTHER; note = misc_feature - bicyclic nucleic acid scaffold modification
  modified_base 18: mod_base = OTHER; note = misc_feature - bicyclic nucleic acid scaffold modification
  source 1..18: mol_type = other RNA
tttgccnctgcccaatgc

SEQ ID NO: 3992 - RNA, 18 nt, synthetic construct
  modified_base 1: mod_base = OTHER; note = thymine
  misc_feature 1..18: note = Antisense oligonucleotide
  modified_base 1: mod_base = OTHER; note = misc_feature - bicyclic nucleic acid scaffold modification
  modified_base 7: mod_base = OTHER; note = misc_feature - n is inosine, often denoted as i
  modified_base 17..18: mod_base = OTHER; note = misc_feature - bicyclic nucleic acid scaffold modification
  source 1..18: mol_type = other RNA
tttgccnctgcccaatgc

SEQ ID NO: 3993 - RNA, 18 nt, synthetic construct
  modified_base 1: mod_base = OTHER; note = thymine
  misc_feature 1..18: note = Antisense oligonucleotide
  modified_base 1: mod_base = OTHER; note = misc_feature - bicyclic nucleic acid scaffold modification
  modified_base 4: mod_base = OTHER; note = misc_feature - bicyclic nucleic acid scaffold modification
  modified_base 7: mod_base = OTHER; note = misc_feature - n is inosine, often denoted as i
  modified_base 10: mod_base = OTHER; note = misc_feature - bicyclic nucleic acid scaffold modification
  modified_base 18: mod_base = OTHER; note = misc_feature - bicyclic nucleic acid scaffold modification
  source 1..18: mol_type = other RNA
tttgccnctgcccaatgc

SEQ ID NO: 3994 - RNA, 18 nt, synthetic construct
  modified_base 1: mod_base = OTHER; note = thymine
  misc_feature 1..18: note = Antisense oligonucleotide
  modified_base 1: mod_base = OTHER; note = misc_feature - bicyclic nucleic acid scaffold modification
  modified_base 7: mod_base = OTHER; note = misc_feature - n is inosine, often denoted as i
  modified_base 8: mod_base = OTHER; note = misc_feature - bicyclic nucleic acid scaffold modification
  modified_base 13: mod_base = OTHER; note = misc_feature - bicyclic nucleic acid scaffold modification
  modified_base 18: mod_base = OTHER; note = misc_feature - bicyclic nucleic acid scaffold modification
  source 1..18: mol_type = other RNA
tttgccnctgcccaatgc

SEQ ID NO: 3995 - RNA, 18 nt, synthetic construct
  modified_base 1: mod_base = OTHER; note = thymine
  misc_feature 1..18: note = Antisense oligonucleotide
  modified_base 1: mod_base = OTHER; note = misc_feature - bicyclic nucleic acid scaffold modification
  modified_base 6: mod_base = OTHER; note = misc_feature - bicyclic nucleic acid scaffold modification
  modified_base 7: mod_base = OTHER; note = misc_feature - n is inosine, often denoted as i
  modified_base 18: mod_base = OTHER; note = misc_feature - bicyclic nucleic acid scaffold modification
  source 1..18: mol_type = other RNA
tttgccnctgcccaatgc

SEQ ID NO: 3996 - RNA, 18 nt, synthetic construct
  modified_base 1: mod_base = OTHER; note = thymine
  misc_feature 1..18: note = Antisense oligonucleotide
  modified_base 1: mod_base = OTHER; note = misc_feature - bicyclic nucleic acid scaffold modification
  modified_base 7: mod_base = OTHER; note = misc_feature - n is inosine, often denoted as i
  modified_base 8: mod_base = OTHER; note = misc_feature - bicyclic nucleic acid scaffold modification
  modified_base 13: mod_base = OTHER; note = misc_feature - bicyclic nucleic acid scaffold modification
  modified_base 18: mod_base = OTHER; note = misc_feature - bicyclic nucleic acid scaffold modification
  source 1..18: mol_type = other RNA
tttgccnctgcccaatgc

SEQ ID NO: 3997 - RNA, 18 nt, synthetic construct
  modified_base 1..2: mod_base = OTHER; note = thymine
  misc_feature 1..18: note = Antisense oligonucleotide
  modified_base 1..2: mod_base = OTHER; note = misc_feature - bicyclic nucleic acid scaffold modification
  modified_base 7: mod_base = OTHER; note = misc_feature - n is inosine, often denoted as i
  modified_base 17..18: mod_base = OTHER; note = misc_feature - bicyclic nucleic acid scaffold modification
  source 1..18: mol_type = other RNA
tttgccnctgcccaatgc

SEQ ID NO: 3998 - RNA, 18 nt, synthetic construct
  modified_base 1..2: mod_base = OTHER; note = thymine
  misc_feature 1..18: note = Antisense oligonucleotide
  modified_base 1..2: mod_base = OTHER; note = misc_feature - bicyclic nucleic acid scaffold modification
  modified_base 7: mod_base = OTHER; note = misc_feature - n is inosine, often denoted as i
  modified_base 10: mod_base = OTHER; note = misc_feature - bicyclic nucleic acid scaffold modification
  modified_base 17..18: mod_base = OTHER; note = misc_feature - bicyclic nucleic acid scaffold modification
  source 1..18: mol_type = other RNA
tttgccnctgcccaatgc

SEQ ID NO: 3999 - RNA, 18 nt, synthetic construct
  modified_base 1..2: mod_base = OTHER; note = thymine
  misc_feature 1..18: note = Antisense oligonucleotide
  modified_base 1..2: mod_base = OTHER; note = misc_feature - bicyclic nucleic acid scaffold modification
  modified_base 7: mod_base = OTHER; note = misc_feature - n is inosine, often denoted as i
  modified_base 8: mod_base = OTHER; note = misc_feature - bicyclic nucleic acid scaffold modification
  modified_base 13: mod_base = OTHER; note = misc_feature - bicyclic nucleic acid scaffold modification
  modified_base 17..18: mod_base = OTHER; note = misc_feature - bicyclic nucleic acid scaffold modification
  source 1..18: mol_type = other RNA
tttgccnctgcccaatgc

SEQ ID NO: 4000 - RNA, 18 nt, synthetic construct
  modified_base 1: mod_base = OTHER; note = thymine
  misc_feature 1..18: note = Antisense oligonucleotide
  modified_base 1: mod_base = OTHER; note = misc_feature - bicyclic nucleic acid scaffold modification
  modified_base 6: mod_base = OTHER; note = misc_feature - n is inosine, often denoted as i
  modified_base 18: mod_base = OTHER; note = misc_feature - bicyclic nucleic acid scaffold modification
  source 1..18: mol_type = other RNA
ttgccnctgcccaatgcc

SEQ ID NO: 4001 - RNA, 18 nt, synthetic construct
  modified_base 1: mod_base = OTHER; note = thymine
  misc_feature 1..18: note = Antisense oligonucleotide
  modified_base 1: mod_base = OTHER; note = misc_feature - bicyclic nucleic acid scaffold modification
  modified_base 3: mod_base = OTHER; note = misc_feature - bicyclic nucleic acid scaffold modification
  modified_base 6: mod_base = OTHER; note = misc_feature - n is inosine, often denoted as i
  modified_base 18: mod_base = OTHER; note = misc_feature - bicyclic nucleic acid scaffold modification
  source 1..18: mol_type = other RNA
ttgccnctgcccaatgcc

SEQ ID NO: 4002 - RNA, 18 nt, synthetic construct
  modified_base 1: mod_base = OTHER; note = thymine
  misc_feature 1..18: note = Antisense oligonucleotide
  modified_base 1: mod_base = OTHER; note = misc_feature - bicyclic nucleic acid scaffold modification
  modified_base 6: mod_base = OTHER; note = misc_feature - n is inosine, often denoted as i
  modified_base 9: mod_base = OTHER; note = misc_feature - bicyclic nucleic acid scaffold modification
  modified_base 18: mod_base = OTHER; note = misc_feature - bicyclic nucleic acid scaffold modification
  source 1..18: mol_type = other RNA
ttgccnctgcccaatgcc

SEQ ID NO: 4003 - RNA, 18 nt, synthetic construct
  modified_base 1: mod_base = OTHER; note = thymine
  misc_feature 1..18: note = Antisense oligonucleotide
  modified_base 1: mod_base = OTHER; note = misc_feature - bicyclic nucleic acid scaffold modification
  modified_base 6: mod_base = OTHER; note = misc_feature - n is inosine, often denoted as i
  modified_base 16: mod_base = OTHER; note = misc_feature - bicyclic nucleic acid scaffold modification
  modified_base 18: mod_base = OTHER; note = misc_feature - bicyclic nucleic acid scaffold modification
  source 1..18: mol_type = other RNA
ttgccnctgcccaatgcc

SEQ ID NO: 4004 - RNA, 18 nt, synthetic construct
  modified_base 1: mod_base = OTHER; note = thymine
  misc_feature 1..18: note = Antisense oligonucleotide
  modified_base 1: mod_base = OTHER; note = misc_feature - bicyclic nucleic acid scaffold modification
  modified_base 6: mod_base = OTHER; note = misc_feature - n is inosine, often denoted as i
  modified_base 9: mod_base = OTHER; note = misc_feature - bicyclic nucleic acid scaffold modification
  modified_base 16: mod_base = OTHER; note = misc_feature - bicyclic nucleic acid scaffold modification
  modified_base 18: mod_base = OTHER; note = misc_feature - bicyclic nucleic acid scaffold modification
  source 1..18: mol_type = other RNA
ttgccnctgcccaatgcc

SEQ ID NO: 4005 - RNA, 18 nt, synthetic construct
  modified_base 1: mod_base = OTHER; note = thymine
  misc_feature 1..18: note = Antisense oligonucleotide
  modified_base 1: mod_base = OTHER; note = misc_feature - bicyclic nucleic acid scaffold modification
  modified_base 3: mod_base = OTHER; note = misc_feature - bicyclic nucleic acid scaffold modification
  modified_base 6: mod_base = OTHER; note = misc_feature - n is inosine, often denoted as i
  modified_base 9: mod_base = OTHER; note = misc_feature - bicyclic nucleic acid scaffold modification
  modified_base 18: mod_base = OTHER; note = misc_feature - bicyclic nucleic acid scaffold modification
  source 1..18: mol_type = other RNA
ttgccnctgcccaatgcc

SEQ ID NO: 4006 - RNA, 18 nt, synthetic construct
  modified_base 1: mod_base = OTHER; note = thymine
  misc_feature 1..18: note = Antisense oligonucleotide
  modified_base 1: mod_base = OTHER; note = misc_feature - bicyclic nucleic acid scaffold modification
  modified_base 6: mod_base = OTHER; note = misc_feature - n is inosine, often denoted as i
  modified_base 12: mod_base = OTHER; note = misc_feature - bicyclic nucleic acid scaffold modification
  modified_base 18: mod_base = OTHER; note = misc_feature - bicyclic nucleic acid scaffold modification
  source 1..18: mol_type = other RNA
ttgccnctgcccaatgcc

SEQ ID NO: 4007 - RNA, 18 nt, synthetic construct
  modified_base 1: mod_base = OTHER; note = thymine
  misc_feature 1..18: note = Antisense oligonucleotide
  modified_base 1: mod_base = OTHER; note = misc_feature - bicyclic nucleic acid scaffold modification
  modified_base 6: mod_base = OTHER; note = misc_feature - n is inosine, often denoted as i
  modified_base 7: mod_base = OTHER; note = misc_feature - bicyclic nucleic acid scaffold modification
  modified_base 18: mod_base = OTHER; note = misc_feature - bicyclic nucleic acid scaffold modification
  source 1..18: mol_type = other RNA
ttgccnctgcccaatgcc

SEQ ID NO: 4008 - RNA, 18 nt, synthetic construct
  modified_base 1: mod_base = OTHER; note = thymine
  misc_feature 1..18: note = Antisense oligonucleotide
  modified_base 1: mod_base = OTHER; note = misc_feature - bicyclic nucleic acid scaffold modification
  modified_base 6: mod_base = OTHER; note = misc_feature - n is inosine, often denoted as i
  modified_base 7: mod_base = OTHER; note = misc_feature - bicyclic nucleic acid scaffold modification
  modified_base 12: mod_base = OTHER; note = misc_feature - bicyclic nucleic acid scaffold modification
  modified_base 18: mod_base = OTHER; note = misc_feature - bicyclic nucleic acid scaffold modification
  source 1..18: mol_type = other RNA
ttgccnctgcccaatgcc

SEQ ID NO: 4009 - RNA, 18 nt, synthetic construct
  modified_base 1: mod_base = OTHER; note = thymine
  misc_feature 1..18: note = Antisense oligonucleotide
  modified_base 1: mod_base = OTHER; note = misc_feature - bicyclic nucleic acid scaffold modification
  modified_base 3: mod_base = OTHER; note = misc_feature - bicyclic nucleic acid scaffold modification
  modified_base 6: mod_base = OTHER; note = misc_feature - n is inosine, often denoted as i
  modified_base 16: mod_base = OTHER; note = misc_feature - bicyclic nucleic acid scaffold modification
  modified_base 18: mod_base = OTHER; note = misc_feature - bicyclic nucleic acid scaffold modification
  source 1..18: mol_type = other RNA
ttgccnctgcccaatgcc

SEQ ID NO: 4010 - RNA, 18 nt, synthetic construct
  modified_base 1: mod_base = OTHER; note = thymine
  misc_feature 1..18: note = Antisense oligonucleotide
  modified_base 1: mod_base = OTHER; note = misc_feature - bicyclic nucleic acid scaffold modification
  modified_base 3: mod_base = OTHER; note = misc_feature - bicyclic nucleic acid scaffold modification
  modified_base 6: mod_base = OTHER; note = misc_feature - n is inosine, often denoted as i
  modified_base 9: mod_base = OTHER; note = misc_feature - bicyclic nucleic acid scaffold modification
  modified_base 16: mod_base = OTHER; note = misc_feature - bicyclic nucleic acid scaffold modification
  modified_base 18: mod_base = OTHER; note = misc_feature - bicyclic nucleic acid scaffold modification
  source 1..18: mol_type = other RNA
ttgccnctgcccaatgcc

SEQ ID NO: 4011 - RNA, 18 nt, synthetic construct
  modified_base 1..2: mod_base = OTHER; note = thymine
  misc_feature 1..18: note = Antisense oligonucleotide
  modified_base 1..2: mod_base = OTHER; note = misc_feature - bicyclic nucleic acid scaffold modification
  modified_base 6: mod_base = OTHER; note = misc_feature - n is inosine, often denoted as i
  modified_base 17..18: mod_base = OTHER; note = misc_feature - bicyclic nucleic acid scaffold modification
  source 1..18: mol_type = other RNA
ttgccnctgcccaatgcc

SEQ ID NO: 4012 - RNA, 18 nt, synthetic construct
  modified_base 1..2: mod_base = OTHER; note = thymine
  misc_feature 1..18: note = Antisense oligonucleotide
  modified_base 1..2: mod_base = OTHER; note = misc_feature - bicyclic nucleic acid scaffold modification
  modified_base 6: mod_base = OTHER; note = misc_feature - n is inosine, often denoted as i
  modified_base 9: mod_base = OTHER; note = misc_feature - bicyclic nucleic acid scaffold modification
  modified_base 17..18: mod_base = OTHER; note = misc_feature - bicyclic nucleic acid scaffold modification
  source 1..18: mol_type = other RNA
ttgccnctgcccaatgcc

SEQ ID NO: 4013 - RNA, 18 nt, synthetic construct
  modified_base 1..2: mod_base = OTHER; note = thymine
  misc_feature 1..18: note = Antisense oligonucleotide
  modified_base 1..2: mod_base = OTHER; note = misc_feature - bicyclic nucleic acid scaffold modification
  modified_base 6: mod_base = OTHER; note = misc_feature - n is inosine, often denoted as i
  modified_base 7: mod_base = OTHER; note = misc_feature - bicyclic nucleic acid scaffold modification
  modified_base 9: mod_base = OTHER; note = misc_feature - bicyclic nucleic acid scaffold modification
  modified_base 12: mod_base = OTHER; note = misc_feature - bicyclic nucleic acid scaffold modification
  modified_base 17..18: mod_base = OTHER; note = misc_feature - bicyclic nucleic acid scaffold modification
  source 1..18: mol_type = other RNA
ttgccnctgcccaatgcc

SEQ ID NO: 4014 - RNA, 18 nt, synthetic construct
  modified_base 1: mod_base = OTHER; note = thymine
  misc_feature 1..18: note = Antisense oligonucleotide
  modified_base 1: mod_base = OTHER; note = misc_feature - bicyclic nucleic acid scaffold modification
  modified_base 5: mod_base = OTHER; note = misc_feature - n is inosine, often denoted as i
  modified_base 18: mod_base = OTHER; note = misc_feature - bicyclic nucleic acid scaffold modification
  source 1..18: mol_type = other RNA
tgccnctgcccaatgcca

SEQ ID NO: 4015 - RNA, 18 nt, synthetic construct
  modified_base 1: mod_base = OTHER; note = thymine
  misc_feature 1..18: note = Antisense oligonucleotide
  modified_base 1..2: mod_base = OTHER; note = misc_feature - bicyclic nucleic acid scaffold modification
  modified_base 5: mod_base = OTHER; note = misc_feature - n is inosine, often denoted as i
  modified_base 18: mod_base = OTHER; note = misc_feature - bicyclic nucleic acid scaffold modification
  source 1..18: mol_type = other RNA
tgccnctgcccaatgcca

SEQ ID NO: 4016 - RNA, 18 nt, synthetic construct
  modified_base 1: mod_base = OTHER; note = thymine
  misc_feature 1..18: note = Antisense oligonucleotide
  modified_base 1: mod_base = OTHER; note = misc_feature - bicyclic nucleic acid scaffold modification
  modified_base 5: mod_base = OTHER; note = misc_feature - n is inosine, often denoted as i
  modified_base 8: mod_base = OTHER; note = misc_feature - bicyclic nucleic acid scaffold modification
  modified_base 18: mod_base = OTHER; note = misc_feature - bicyclic nucleic acid scaffold modification
  source 1..18: mol_type = other RNA
tgccnctgcccaatgcca

SEQ ID NO: 4017 - RNA, 18 nt, synthetic construct
  modified_base 1: mod_base = OTHER; note = thymine
  misc_feature 1..18: note = Antisense oligonucleotide
  modified_base 1: mod_base = OTHER; note = misc_feature - bicyclic nucleic acid scaffold modification
  modified_base 5: mod_base = OTHER; note = misc_feature - n is inosine, often denoted as i
  modified_base 15: mod_base = OTHER; note = misc_feature - bicyclic nucleic acid scaffold modification
  modified_base 18: mod_base = OTHER; note = misc_feature - bicyclic nucleic acid scaffold modification
  source 1..18: mol_type = other RNA
tgccnctgcccaatgcca

SEQ ID NO: 4018 - RNA, 18 nt, synthetic construct
  modified_base 1: mod_base = OTHER; note = thymine
  misc_feature 1..18: note = Antisense oligonucleotide
  modified_base 1: mod_base = OTHER; note = misc_feature - bicyclic nucleic acid scaffold modification
  modified_base 5: mod_base = OTHER; note = misc_feature - n is inosine, often denoted as i
  modified_base 8: mod_base = OTHER; note = misc_feature - bicyclic nucleic acid scaffold modification
  modified_base 15: mod_base = OTHER; note = misc_feature - bicyclic nucleic acid scaffold modification
  modified_base 18: mod_base = OTHER; note = misc_feature - bicyclic nucleic acid scaffold modification
  source 1..18: mol_type = other RNA
tgccnctgcccaatgcca

SEQ ID NO: 4019 - RNA, 18 nt, synthetic construct
  modified_base 1: mod_base = OTHER; note = thymine
  misc_feature 1..18: note = Antisense oligonucleotide
  modified_base 1..2: mod_base = OTHER; note = misc_feature - bicyclic nucleic acid scaffold modification
  modified_base 5: mod_base = OTHER; note = misc_feature - n is inosine, often denoted as i
  modified_base 8: mod_base = OTHER; note = misc_feature - bicyclic nucleic acid scaffold modification
  modified_base 18: mod_base = OTHER; note = misc_feature - bicyclic nucleic acid scaffold modification
  source 1..18: mol_type = other RNA
tgccnctgcccaatgcca

SEQ ID NO: 4020 - RNA, 18 nt, synthetic construct
  modified_base 1: mod_base = OTHER; note = thymine
  misc_feature 1..18: note = Antisense oligonucleotide
  modified_base 1..2: mod_base = OTHER; note = misc_feature - bicyclic nucleic acid scaffold modification
  modified_base 5: mod_base = OTHER; note = misc_feature - n is inosine, often denoted as i
  modified_base 15: mod_base = OTHER; note = misc_feature - bicyclic nucleic acid scaffold modification
  modified_base 18: mod_base = OTHER; note = misc_feature - bicyclic nucleic acid scaffold modification
  source 1..18: mol_type = other RNA
tgccnctgcccaatgcca

SEQ ID NO: 4021 - RNA, 18 nt, synthetic construct
  modified_base 1: mod_base = OTHER; note = thymine
  misc_feature 1..18: note = Antisense oligonucleotide
  modified_base 1: mod_base = OTHER; note = misc_feature - bicyclic nucleic acid scaffold modification
  modified_base 5: mod_base = OTHER; note = misc_feature - n is inosine, often denoted as i
  modified_base 11: mod_base = OTHER; note = misc_feature - bicyclic nucleic acid scaffold modification
  modified_base 18: mod_base = OTHER; note = misc_feature - bicyclic nucleic acid scaffold modification
  source 1..18: mol_type = other RNA
tgccnctgcccaatgcca

SEQ ID NO: 4022 - RNA, 18 nt, synthetic construct
  modified_base 1: mod_base = OTHER; note = thymine
  misc_feature 1..18: note = Antisense oligonucleotide
  modified_base 1: mod_base = OTHER; note = misc_feature - bicyclic nucleic acid scaffold modification
  modified_base 5: mod_base = OTHER; note = misc_feature - n is inosine, often denoted as i
  modified_base 6: mod_base = OTHER; note = misc_feature - bicyclic nucleic acid scaffold modification
  modified_base 11: mod_base = OTHER; note = misc_feature - bicyclic nucleic acid scaffold modification
  modified_base 18: mod_base = OTHER; note = misc_feature - bicyclic nucleic acid scaffold modification
  source 1..18: mol_type = other RNA
tgccnctgcccaatgcca

SEQ ID NO: 4023 - RNA, 18 nt, synthetic construct
  modified_base 1: mod_base = OTHER; note = thymine
  misc_feature 1..18: note = Antisense oligonucleotide
  modified_base 1: mod_base = OTHER; note = misc_feature - bicyclic nucleic acid scaffold modification
  modified_base 5: mod_base = OTHER; note = misc_feature - n is inosine, often denoted as i
  modified_base 6: mod_base = OTHER; note = misc_feature - bicyclic nucleic acid scaffold modification
  modified_base 18: mod_base = OTHER; note = misc_feature - bicyclic nucleic acid scaffold modification
  source 1..18: mol_type = other RNA
tgccnctgcccaatgcca

SEQ ID NO: 4024 - RNA, 18 nt, synthetic construct
  modified_base 1: mod_base = OTHER; note = thymine
  misc_feature 1..18: note = Antisense oligonucleotide
  modified_base 1: mod_base = OTHER; note = misc_feature - bicyclic nucleic acid scaffold modification
  modified_base 4: mod_base = OTHER; note = misc_feature - bicyclic nucleic acid scaffold modification
  modified_base 5: mod_base = OTHER; note = misc_feature - n is inosine, often denoted as i
  modified_base 17..18: mod_base = OTHER; note = misc_feature - bicyclic nucleic acid scaffold modification
  source 1..18: mol_type = other RNA
tgccnctgcccaatgcca

SEQ ID NO: 4025 - RNA, 18 nt, synthetic construct
  modified_base 1: mod_base = OTHER; note = thymine
  misc_feature 1..18: note = Antisense oligonucleotide
  modified_base 1..2: mod_base = OTHER; note = misc_feature - bicyclic nucleic acid scaffold modification
  modified_base 5: mod_base = OTHER; note = misc_feature - n is inosine, often denoted as i
  modified_base 17..18: mod_base = OTHER; note = misc_feature - bicyclic nucleic acid scaffold modification
  source 1..18: mol_type = other RNA
tgccnctgcccaatgcca

SEQ ID NO: 4026 - RNA, 18 nt, synthetic construct
  modified_base 1: mod_base = OTHER; note = thymine
  misc_feature 1..18: note = Antisense oligonucleotide
  modified_base 1..2: mod_base = OTHER; note = misc_feature - bicyclic nucleic acid scaffold modification
  modified_base 5: mod_base = OTHER; note = misc_feature - n is inosine, often denoted as i
  modified_base 6: mod_base = OTHER; note = misc_feature - bicyclic nucleic acid scaffold modification
  modified_base 11: mod_base = OTHER; note = misc_feature - bicyclic nucleic acid scaffold modification
  modified_base 17..18: mod_base = OTHER; note = misc_feature - bicyclic nucleic acid scaffold modification
  source 1..18: mol_type = other RNA
tgccnctgcccaatgcca

SEQ ID NO: 4027 - RNA, 18 nt, synthetic construct
  modified_base 1: mod_base = OTHER; note = thymine
  misc_feature 1..18: note = Antisense oligonucleotide
  modified_base 1..2: mod_base = OTHER; note = misc_feature - bicyclic nucleic acid scaffold modification
  modified_base 5: mod_base = OTHER; note = misc_feature - n is inosine, often denoted as i
  modified_base 8: mod_base = OTHER; note = misc_feature - bicyclic nucleic acid scaffold modification
  modified_base 15: mod_base = OTHER; note = misc_feature - bicyclic nucleic acid scaffold modification
  modified_base 17..18: mod_base = OTHER; note = misc_feature - bicyclic nucleic acid scaffold modification
  source 1..18: mol_type = other RNA
tgccnctgcccaatgcca

SEQ ID NO: 4028 - RNA, 18 nt, synthetic construct
  modified_base 18: mod_base = OTHER; note = thymine
  misc_feature 1..18: note = Antisense oligonucleotide
  modified_base 1: mod_base = OTHER; note = misc_feature - bicyclic nucleic acid scaffold modification
  modified_base 4: mod_base = OTHER; note = misc_feature - n is inosine, often denoted as i
  modified_base 18: mod_base = OTHER; note = misc_feature - bicyclic nucleic acid scaffold modification
  source 1..18: mol_type = other RNA
gccnctgcccaatgccat

SEQ ID NO: 4029 - RNA, 18 nt, synthetic construct
  modified_base 18: mod_base = OTHER; note = thymine
  misc_feature 1..18: note = Antisense oligonucleotide
  modified_base 1: mod_base = OTHER; note = misc_feature - bicyclic nucleic acid scaffold modification
  modified_base 4: mod_base = OTHER; note = misc_feature - n is inosine, often denoted as i
  modified_base 7: mod_base = OTHER; note = misc_feature - bicyclic nucleic acid scaffold modification
  modified_base 18: mod_base = OTHER; note = misc_feature - bicyclic nucleic acid scaffold modification
  source 1..18: mol_type = other RNA
gccnctgcccaatgccat

SEQ ID NO: 4030 - RNA, 18 nt, synthetic construct
  modified_base 18: mod_base = OTHER; note = thymine
  misc_feature 1..18: note = Antisense oligonucleotide
  modified_base 1: mod_base = OTHER; note = misc_feature - bicyclic nucleic acid scaffold modification
  modified_base 4: mod_base = OTHER; note = misc_feature - n is inosine, often denoted as i
  modified_base 14: mod_base = OTHER; note = misc_feature - bicyclic nucleic acid scaffold modification
  modified_base 18: mod_base = OTHER; note = misc_feature - bicyclic nucleic acid scaffold modification
  source 1..18: mol_type = other RNA
gccnctgcccaatgccat

SEQ ID NO: 4031 - RNA, 18 nt, synthetic construct
  modified_base 18: mod_base = OTHER; note = thymine
  misc_feature 1..18: note = Antisense oligonucleotide
  modified_base 1: mod_base = OTHER; note = misc_feature - bicyclic nucleic acid scaffold modification
  modified_base 4: mod_base = OTHER; note = misc_feature - n is inosine, often denoted as i
  modified_base 7: mod_base = OTHER; note = misc_feature - bicyclic nucleic acid scaffold modification
  modified_base 14: mod_base = OTHER; note = misc_feature - bicyclic nucleic acid scaffold modification
  modified_base 18: mod_base = OTHER; note = misc_feature - bicyclic nucleic acid scaffold modification
  source 1..18: mol_type = other RNA
gccnctgcccaatgccat

SEQ ID NO: 4032 - RNA, 18 nt, synthetic construct
  modified_base 18: mod_base = OTHER; note = thymine
  misc_feature 1..18: note = Antisense oligonucleotide
  modified_base 1: mod_base = OTHER; note = misc_feature - bicyclic nucleic acid scaffold modification
  modified_base 4: mod_base = OTHER; note = misc_feature - n is inosine, often denoted as i
  modified_base 16: mod_base = OTHER; note = misc_feature - bicyclic nucleic acid scaffold modification
  modified_base 18: mod_base = OTHER; note = misc_feature - bicyclic nucleic acid scaffold modification
  source 1..18: mol_type = other RNA
gccnctgcccaatgccat

SEQ ID NO: 4033 - RNA, 18 nt, synthetic construct
  modified_base 18: mod_base = OTHER; note = thymine
  misc_feature 1..18: note = Antisense oligonucleotide
  modified_base 1: mod_base = OTHER; note = misc_feature - bicyclic nucleic acid scaffold modification
  modified_base 4: mod_base = OTHER; note = misc_feature - n is inosine, often denoted as i
  modified_base 10: mod_base = OTHER; note = misc_feature - bicyclic nucleic acid scaffold modification
  modified_base 18: mod_base = OTHER; note = misc_feature - bicyclic nucleic acid scaffold modification
  source 1..18: mol_type = other RNA
gccnctgcccaatgccat

SEQ ID NO: 4034 - RNA, 18 nt, synthetic construct
  modified_base 18: mod_base = OTHER; note = thymine
  misc_feature 1..18: note = Antisense oligonucleotide
  modified_base 1: mod_base = OTHER; note = misc_feature - bicyclic nucleic acid scaffold modification
  modified_base 4: mod_base = OTHER; note = misc_feature - n is inosine, often denoted as i
  modified_base 5: mod_base = OTHER; note = misc_feature - bicyclic nucleic acid scaffold modification
  modified_base 18: mod_base = OTHER; note = misc_feature - bicyclic nucleic acid scaffold modification
  source 1..18: mol_type = other RNA
gccnctgcccaatgccat

SEQ ID NO: 4035 - RNA, 18 nt, synthetic construct
  modified_base 18: mod_base = OTHER; note = thymine
  misc_feature 1..18: note = Antisense oligonucleotide
  modified_base 1: mod_base = OTHER; note = misc_feature - bicyclic nucleic acid scaffold modification
  modified_base 4: mod_base = OTHER; note = misc_feature - n is inosine, often denoted as i
  modified_base 5: mod_base = OTHER; note = misc_feature - bicyclic nucleic acid scaffold modification
  modified_base 10: mod_base = OTHER; note = misc_feature - bicyclic nucleic acid scaffold modification
  modified_base 18: mod_base = OTHER; note = misc_feature - bicyclic nucleic acid scaffold modification
  source 1..18: mol_type = other RNA
gccnctgcccaatgccat

SEQ ID NO: 4036 - RNA, 18 nt, synthetic construct
  modified_base 18: mod_base = OTHER; note = thymine
  misc_feature 1..18: note = Antisense oligonucleotide
  modified_base 1: mod_base = OTHER; note = misc_feature - bicyclic nucleic acid scaffold modification
  modified_base 4: mod_base = OTHER; note = misc_feature - n is inosine, often denoted as i
  modified_base 10: mod_base = OTHER; note = misc_feature - bicyclic nucleic acid scaffold modification
  modified_base 16: mod_base = OTHER; note = misc_feature - bicyclic nucleic acid scaffold modification
  modified_base 18: mod_base = OTHER; note = misc_feature - bicyclic nucleic acid scaffold modification
  source 1..18: mol_type = other RNA
gccnctgcccaatgccat

SEQ ID NO: 4037 - RNA, 18 nt, synthetic construct
  modified_base 18: mod_base = OTHER; note = thymine
  misc_feature 1..18: note = Antisense oligonucleotide
  modified_base 1..2: mod_base = OTHER; note = misc_feature - bicyclic nucleic acid scaffold modification
  modified_base 4: mod_base = OTHER; note = misc_feature - n is inosine, often denoted as i
  modified_base 17..18: mod_base = OTHER; note = misc_feature - bicyclic nucleic acid scaffold modification
  source 1..18: mol_type = other RNA
gccnctgcccaatgccat

SEQ ID NO: 4038 - RNA, 18 nt, synthetic construct
  modified_base 18: mod_base = OTHER; note = thymine
  misc_feature 1..18: note = Antisense oligonucleotide
  modified_base 1..2: mod_base = OTHER; note = misc_feature - bicyclic nucleic acid scaffold modification
  modified_base 4: mod_base = OTHER; note = misc_feature - n is inosine, often denoted as i
  modified_base 7: mod_base = OTHER; note = misc_feature - bicyclic nucleic acid scaffold modification
  modified_base 17..18: mod_base = OTHER; note = misc_feature - bicyclic nucleic acid scaffold modification
  source 1..18: mol_type = other RNA
gccnctgcccaatgccat

SEQ ID NO: 4039 - RNA, 18 nt, synthetic construct
  modified_base 18: mod_base = OTHER; note = thymine
  misc_feature 1..18: note = Antisense oligonucleotide
  modified_base 1..2: mod_base = OTHER; note = misc_feature - bicyclic nucleic acid scaffold modification
  modified_base 4: mod_base = OTHER; note = misc_feature - n is inosine, often denoted as i
  modified_base 7: mod_base = OTHER; note = misc_feature - bicyclic nucleic acid scaffold modification
  modified_base 14: mod_base = OTHER; note = misc_feature - bicyclic nucleic acid scaffold modification
  modified_base 17..18: mod_base = OTHER; note = misc_feature - bicyclic nucleic acid scaffold modification
  source 1..18: mol_type = other RNA
gccnctgcccaatgccat

SEQ ID NO: 4040 - RNA, 18 nt, synthetic construct
  modified_base 18: mod_base = OTHER; note = thymine
  misc_feature 1..18: note = Antisense oligonucleotide
  modified_base 1..2: mod_base = OTHER; note = misc_feature - bicyclic nucleic acid scaffold modification
  modified_base 4: mod_base = OTHER; note = misc_feature - n is inosine, often denoted as i
  modified_base 10: mod_base = OTHER; note = misc_feature - bicyclic nucleic acid scaffold modification
  modified_base 17..18: mod_base = OTHER; note = misc_feature - bicyclic nucleic acid scaffold modification
  source 1..18: mol_type = other RNA
gccnctgcccaatgccat

SEQ ID NO: 4041 - RNA, 18 nt, synthetic construct
  misc_feature 1..18: note = Antisense oligonucleotide
  modified_base 1: mod_base = OTHER; note = misc_feature - bicyclic nucleic acid scaffold modification
  modified_base 3: mod_base = OTHER; note = misc_feature - n is inosine, often denoted as i
  modified_base 18: mod_base = OTHER; note = misc_feature - bicyclic nucleic acid scaffold modification
  source 1..18: mol_type = other RNA
ccnctgcccaatgccatc

SEQ ID NO: 4042 - RNA, 18 nt, synthetic construct
  misc_feature 1..18: note = Antisense oligonucleotide
  modified_base 1: mod_base = OTHER; note = misc_feature - bicyclic nucleic acid scaffold modification
  modified_base 3: mod_base = OTHER; note = misc_feature - n is inosine, often denoted as i
  modified_base 6: mod_base = OTHER; note = misc_feature - bicyclic nucleic acid scaffold modification
  modified_base 18: mod_base = OTHER; note = misc_feature - bicyclic nucleic acid scaffold modification
  source 1..18: mol_type = other RNA
ccnctgcccaatgccatc

SEQ ID NO: 4043 - RNA, 18 nt, synthetic construct
  misc_feature 1..18: note = Antisense oligonucleotide
  modified_base 1: mod_base = OTHER; note = misc_feature - bicyclic nucleic acid scaffold modification
  modified_base 3: mod_base = OTHER; note = misc_feature - n is inosine, often denoted as i
  modified_base 13: mod_base = OTHER; note = misc_feature - bicyclic nucleic acid scaffold modification
  modified_base 18: mod_base = OTHER; note = misc_feature - bicyclic nucleic acid scaffold modification
  source 1..18: mol_type = other RNA
ccnctgcccaatgccatc

SEQ ID NO: 4044 - RNA, 18 nt, synthetic construct
  misc_feature 1..18: note = Antisense oligonucleotide
  modified_base 1: mod_base = OTHER; note = misc_feature - bicyclic nucleic acid scaffold modification
  modified_base 3: mod_base = OTHER; note = misc_feature - n is inosine, often denoted as i
  modified_base 6: mod_base = OTHER; note = misc_feature - bicyclic nucleic acid scaffold modification
  modified_base 13: mod_base = OTHER; note = misc_feature - bicyclic nucleic acid scaffold modification
  modified_base 18: mod_base = OTHER; note = misc_feature - bicyclic nucleic acid scaffold modification
  source 1..18: mol_type = other RNA
ccnctgcccaatgccatc

SEQ ID NO: 4045 - RNA, 18 nt, synthetic construct
  misc_feature 1..18: note = Antisense oligonucleotide
  modified_base 1: mod_base = OTHER; note = misc_feature - bicyclic nucleic acid scaffold modification
  modified_base 3: mod_base = OTHER; note = misc_feature - n is inosine, often denoted as i
  modified_base 15: mod_base = OTHER; note = misc_feature - bicyclic nucleic acid scaffold modification
  modified_base 18: mod_base = OTHER; note = misc_feature - bicyclic nucleic acid scaffold modification
  source 1..18: mol_type = other RNA
ccnctgcccaatgccatc

SEQ ID NO: 4046 - RNA, 18 nt, synthetic construct
  misc_feature 1..18: note = Antisense oligonucleotide
  modified_base 1: mod_base = OTHER; note = misc_feature - bicyclic nucleic acid scaffold modification
  modified_base 3: mod_base = OTHER; note = misc_feature - n is inosine, often denoted as i
  modified_base 9: mod_base = OTHER; note = misc_feature - bicyclic nucleic acid scaffold modification
  modified_base 18: mod_base = OTHER; note = misc_feature - bicyclic nucleic acid scaffold modification
  source 1..18: mol_type = other RNA
ccnctgcccaatgccatc

SEQ ID NO: 4047 - RNA, 18 nt, synthetic construct
  misc_feature 1..18: note = Antisense oligonucleotide
  modified_base 1: mod_base = OTHER; note = misc_feature - bicyclic nucleic acid scaffold modification
  modified_base 3: mod_base = OTHER; note = misc_feature - n is inosine, often denoted as i
  modified_base 4: mod_base = OTHER; note = misc_feature - bicyclic nucleic acid scaffold modification
  modified_base 18: mod_base = OTHER; note = misc_feature - bicyclic nucleic acid scaffold modification
  source 1..18: mol_type = other RNA
ccnctgcccaatgccatc

SEQ ID NO: 4048 - RNA, 18 nt, synthetic construct
  misc_feature 1..18: note = Antisense oligonucleotide
  modified_base 1: mod_base = OTHER; note = misc_feature - bicyclic nucleic acid scaffold modification
  modified_base 3: mod_base = OTHER; note = misc_feature - n is inosine, often denoted as i
  modified_base 9: mod_base = OTHER; note = misc_feature - bicyclic nucleic acid scaffold modification
  modified_base 15: mod_base = OTHER; note = misc_feature - bicyclic nucleic acid scaffold modification
  modified_base 18: mod_base = OTHER; note = misc_feature - bicyclic nucleic acid scaffold modification
  source 1..18: mol_type = other RNA
ccnctgcccaatgccatc

SEQ ID NO: 4049 - RNA, 18 nt, synthetic construct
  misc_feature 1..18: note = Antisense oligonucleotide
  modified_base 1: mod_base = OTHER; note = misc_feature - bicyclic nucleic acid scaffold modification
  modified_base 3: mod_base = OTHER; note = misc_feature - n is inosine, often denoted as i
  modified_base 4: mod_base = OTHER; note = misc_feature - bicyclic nucleic acid scaffold modification
  modified_base 9: mod_base = OTHER; note = misc_feature - bicyclic nucleic acid scaffold modification
  modified_base 18: mod_base = OTHER; note = misc_feature - bicyclic nucleic acid scaffold modification
  source 1..18: mol_type = other RNA
ccnctgcccaatgccatc

SEQ ID NO: 4050 - RNA, 18 nt, synthetic construct
  modified_base 17: mod_base = OTHER; note = thymine
  misc_feature 1..18: note = Antisense oligonucleotide
  modified_base 1..2: mod_base = OTHER; note = misc_feature - bicyclic nucleic acid scaffold modification
  modified_base 3: mod_base = OTHER; note = misc_feature - n is inosine, often denoted as i
  modified_base 17..18: mod_base = OTHER; note = misc_feature - bicyclic nucleic acid scaffold modification
  source 1..18: mol_type = other RNA
ccnctgcccaatgccatc

SEQ ID NO: 4051 - RNA, 18 nt, synthetic construct
  modified_base 17: mod_base = OTHER; note = thymine
  misc_feature 1..18: note = Antisense oligonucleotide
  modified_base 1..2: mod_base = OTHER; note = misc_feature - bicyclic nucleic acid scaffold modification
  modified_base 3: mod_base = OTHER; note = misc_feature - n is inosine, often denoted as i
  modified_base 13: mod_base = OTHER; note = misc_feature - bicyclic nucleic acid scaffold modification
  modified_base 17..18: mod_base = OTHER; note = misc_feature - bicyclic nucleic acid scaffold modification
  source 1..18: mol_type = other RNA
ccnctgcccaatgccatc

SEQ ID NO: 4052 - RNA, 18 nt, synthetic construct
  modified_base 17: mod_base = OTHER; note = thymine
  misc_feature 1..18: note = Antisense oligonucleotide
  modified_base 1..2: mod_base = OTHER; note = misc_feature - bicyclic nucleic acid scaffold modification
  modified_base 3: mod_base = OTHER; note = misc_feature - n is inosine, often denoted as i
  modified_base 6: mod_base = OTHER; note = misc_feature - bicyclic nucleic acid scaffold modification
  modified_base 13: mod_base = OTHER; note = misc_feature - bicyclic nucleic acid scaffold modification
  modified_base 17..18: mod_base = OTHER; note = misc_feature - bicyclic nucleic acid scaffold modification
  source 1..18: mol_type = other RNA
ccnctgcccaatgccatc

SEQ ID NO: 4053 - RNA, 18 nt, synthetic construct
  modified_base 17: mod_base = OTHER; note = thymine
  misc_feature 1..18: note = Antisense oligonucleotide
  modified_base 1..2: mod_base = OTHER; note = misc_feature - bicyclic nucleic acid scaffold modification
  modified_base 3: mod_base = OTHER; note = misc_feature - n is inosine, often denoted as i
  modified_base 9: mod_base = OTHER; note = misc_feature - bicyclic nucleic acid scaffold modification
  modified_base 17..18: mod_base = OTHER; note = misc_feature - bicyclic nucleic acid scaffold modification
  source 1..18: mol_type = other RNA
ccnctgcccaatgccatc

SEQ ID NO: 4054 - RNA, 18 nt, synthetic construct
  misc_feature 1..18: note = Antisense oligonucleotide
  modified_base 1: mod_base = OTHER; note = misc_feature - bicyclic nucleic acid scaffold modification
  modified_base 2: mod_base = OTHER; note = misc_feature - n is inosine, often denoted as i
  modified_base 18: mod_base = OTHER; note = misc_feature - bicyclic nucleic acid scaffold modification
  source 1..18: mol_type = other RNA
cnctgcccaatgccatcc

SEQ ID NO: 4055 - RNA, 18 nt, synthetic construct
  misc_feature 1..18: note = Antisense oligonucleotide
  modified_base 1: mod_base = OTHER; note = misc_feature - bicyclic nucleic acid scaffold modification
  modified_base 2: mod_base = OTHER; note = misc_feature - n is inosine, often denoted as i
  modified_base 12: mod_base = OTHER; note = misc_feature - bicyclic nucleic acid scaffold modification
  modified_base 18: mod_base = OTHER; note = misc_feature - bicyclic nucleic acid scaffold modification
  source 1..18: mol_type = other RNA
cnctgcccaatgccatcc

SEQ ID NO: 4056 - RNA, 18 nt, synthetic construct
  misc_feature 1..18: note = Antisense oligonucleotide
  modified_base 1: mod_base = OTHER; note = misc_feature - bicyclic nucleic acid scaffold modification
  modified_base 2: mod_base = OTHER; note = misc_feature - n is inosine, often denoted as i
  modified_base 5: mod_base = OTHER; note = misc_feature - bicyclic nucleic acid scaffold modification
  modified_base 18: mod_base = OTHER; note = misc_feature - bicyclic nucleic acid scaffold modification
  source 1..18: mol_type = other RNA
cnctgcccaatgccatcc

SEQ ID NO: 4057 - RNA, 18 nt, synthetic construct
  misc_feature 1..18: note = Antisense oligonucleotide
  modified_base 1: mod_base = OTHER; note = misc_feature - bicyclic nucleic acid scaffold modification
  modified_base 2: mod_base = OTHER; note = misc_feature - n is inosine, often denoted as i
  modified_base 5: mod_base = OTHER; note = misc_feature - bicyclic nucleic acid scaffold modification
  modified_base 12: mod_base = OTHER; note = misc_feature - bicyclic nucleic acid scaffold modification
  modified_base 18: mod_base = OTHER; note = misc_feature - bicyclic nucleic acid scaffold modification
  source 1..18: mol_type = other RNA
cnctgcccaatgccatcc

SEQ ID NO: 4058 - RNA, 18 nt, synthetic construct
  misc_feature 1..18: note = Antisense oligonucleotide
  modified_base 1: mod_base = OTHER; note = misc_feature - bicyclic nucleic acid scaffold modification
  modified_base 2: mod_base = OTHER; note = misc_feature - n is inosine, often denoted as i
  modified_base 14: mod_base = OTHER; note = misc_feature - bicyclic nucleic acid scaffold modification
  modified_base 18: mod_base = OTHER; note = misc_feature - bicyclic nucleic acid scaffold modification
  source 1..18: mol_type = other RNA
cnctgcccaatgccatcc

SEQ ID NO: 4059 - RNA, 18 nt, synthetic construct
  misc_feature 1..18: note = Antisense oligonucleotide
  modified_base 1: mod_base = OTHER; note = misc_feature - bicyclic nucleic acid scaffold modification
  modified_base 2: mod_base = OTHER; note = misc_feature - n is inosine, often denoted as i
  modified_base 8: mod_base = OTHER; note = misc_feature - bicyclic nucleic acid scaffold modification
  modified_base 18: mod_base = OTHER; note = misc_feature - bicyclic nucleic acid scaffold modification
  source 1..18: mol_type = other RNA
cnctgcccaatgccatcc

SEQ ID NO: 4060 - RNA, 18 nt, synthetic construct
  misc_feature 1..18: note = Antisense oligonucleotide
  modified_base 1: mod_base = OTHER; note = misc_feature - bicyclic nucleic acid scaffold modification
  modified_base 2: mod_base = OTHER; note = misc_feature - n is inosine, often denoted as i
  modified_base 8: mod_base = OTHER; note = misc_feature - bicyclic nucleic acid scaffold modification
  modified_base 14: mod_base = OTHER; note = misc_feature - bicyclic nucleic acid scaffold modification
  modified_base 18: mod_base = OTHER; note = misc_feature - bicyclic nucleic acid scaffold modification
  source 1..18: mol_type = other RNA
cnctgcccaatgccatcc

SEQ ID NO: 4061 - RNA, 18 nt, synthetic construct
  misc_feature 1..18: note = Antisense oligonucleotide
  modified_base 1: mod_base = OTHER; note = misc_feature - bicyclic nucleic acid scaffold modification
  modified_base 2: mod_base = OTHER; note = misc_feature - n is inosine, often denoted as i
  modified_base 3: mod_base = OTHER; note = misc_feature - bicyclic nucleic acid scaffold modification
  modified_base 14: mod_base = OTHER; note = misc_feature - bicyclic nucleic acid scaffold modification
  modified_base 18: mod_base = OTHER; note = misc_feature - bicyclic nucleic acid scaffold modification
  source 1..18: mol_type = other RNA
cnctgcccaatgccatcc

SEQ ID NO: 4062 - RNA, 18 nt, synthetic construct
  misc_feature 1..18: note = Antisense oligonucleotide
  modified_base 1: mod_base = OTHER; note = misc_feature - bicyclic nucleic acid scaffold modification
  modified_base 2: mod_base = OTHER; note = misc_feature - n is inosine, often denoted as i
  modified_base 12: mod_base = OTHER; note = misc_feature - bicyclic nucleic acid scaffold modification
  modified_base 17..18: mod_base = OTHER; note = misc_feature - bicyclic nucleic acid scaffold modification
  source 1..18: mol_type = other RNA
cnctgcccaatgccatcc

SEQ ID NO: 4063 - RNA, 18 nt, synthetic construct
  misc_feature 1..18: note = Antisense oligonucleotide
  modified_base 1: mod_base = OTHER; note = misc_feature - bicyclic nucleic acid scaffold modification
  modified_base 2: mod_base = OTHER; note = misc_feature - n is inosine, often denoted as i
  modified_base 5: mod_base = OTHER; note = misc_feature - bicyclic nucleic acid scaffold modification
  modified_base 12: mod_base = OTHER; note = misc_feature - bicyclic nucleic acid scaffold modification
  modified_base 17..18: mod_base = OTHER; note = misc_feature - bicyclic nucleic acid scaffold modification
  source 1..18: mol_type = other RNA
cnctgcccaatgccatcc

SEQ ID NO: 4064 - RNA, 18 nt, synthetic construct
  misc_feature 1..18: note = Antisense oligonucleotide
  modified_base 1: mod_base = OTHER; note = misc_feature - bicyclic nucleic acid scaffold modification
  modified_base 2: mod_base = OTHER; note = misc_feature - n is inosine, often denoted as i
  modified_base 8: mod_base = OTHER; note = misc_feature - bicyclic nucleic acid scaffold modification
  modified_base 14: mod_base = OTHER; note = misc_feature - bicyclic nucleic acid scaffold modification
  modified_base 17..18: mod_base = OTHER; note = misc_feature - bicyclic nucleic acid scaffold modification
  source 1..18: mol_type = other RNA
cnctgcccaatgccatcc

SEQ ID NO: 4065 - RNA, 18 nt, synthetic construct
  modified_base 18: mod_base = OTHER; note = thymine
  misc_feature 1..18: note = Antisense oligonucleotide
  modified_base 1: mod_base = OTHER; note = misc_feature - n is inosine, often denoted as i
  modified_base 2: mod_base = OTHER; note = misc_feature - bicyclic nucleic acid scaffold modification
  modified_base 18: mod_base = OTHER; note = misc_feature - bicyclic nucleic acid scaffold modification
  source 1..18: mol_type = other RNA
nctgcccaatgccatcct

SEQ ID NO: 4066 - RNA, 18 nt, synthetic construct
  modified_base 18: mod_base = OTHER; note = thymine
  misc_feature 1..18: note = Antisense oligonucleotide
  modified_base 1: mod_base = OTHER; note = misc_feature - n is inosine, often denoted as i
  modified_base 2: mod_base = OTHER; note = misc_feature - bicyclic nucleic acid scaffold modification
  modified_base 4: mod_base = OTHER; note = misc_feature - bicyclic nucleic acid scaffold modification
  modified_base 18: mod_base = OTHER; note = misc_feature - bicyclic nucleic acid scaffold modification
  source 1..18: mol_type = other RNA
nctgcccaatgccatcct

SEQ ID NO: 4067 - RNA, 18 nt, synthetic construct
  modified_base 18: mod_base = OTHER; note = thymine
  misc_feature 1..18: note = Antisense oligonucleotide
  modified_base 1: mod_base = OTHER; note = misc_feature - n is inosine, often denoted as i
  modified_base 2: mod_base = OTHER; note = misc_feature - bicyclic nucleic acid scaffold modification
  modified_base 11: mod_base = OTHER; note = misc_feature - bicyclic nucleic acid scaffold modification
  modified_base 18: mod_base = OTHER; note = misc_feature - bicyclic nucleic acid scaffold modification
  source 1..18: mol_type = other RNA
nctgcccaatgccatcct

SEQ ID NO: 4068 - RNA, 18 nt, synthetic construct
  modified_base 18: mod_base = OTHER; note = thymine
  misc_feature 1..18: note = Antisense oligonucleotide
  modified_base 1: mod_base = OTHER; note = misc_feature - n is inosine, often denoted as i
  modified_base 2: mod_base = OTHER; note = misc_feature - bicyclic nucleic acid scaffold modification
  modified_base 4: mod_base = OTHER; note = misc_feature - bicyclic nucleic acid scaffold modification
  modified_base 11: mod_base = OTHER; note = misc_feature - bicyclic nucleic acid scaffold modification
  modified_base 18: mod_base = OTHER; note = misc_feature - bicyclic nucleic acid scaffold modification
  source 1..18: mol_type = other RNA
nctgcccaatgccatcct

SEQ ID NO: 4069 - RNA, 18 nt, synthetic construct
  modified_base 18: mod_base = OTHER; note = thymine
  misc_feature 1..18: note = Antisense oligonucleotide
  modified_base 1: mod_base = OTHER; note = misc_feature - n is inosine, often denoted as i
  modified_base 2: mod_base = OTHER; note = misc_feature - bicyclic nucleic acid scaffold modification
  modified_base 7: mod_base = OTHER; note = misc_feature - bicyclic nucleic acid scaffold modification
  modified_base 18: mod_base = OTHER; note = misc_feature - bicyclic nucleic acid scaffold modification
  source 1..18: mol_type = other RNA
nctgcccaatgccatcct

SEQ ID NO: 4070 - RNA, 18 nt, synthetic construct
  modified_base 18: mod_base = OTHER; note = thymine
  misc_feature 1..18: note = Antisense oligonucleotide
  modified_base 1: mod_base = OTHER; note = misc_feature - n is inosine, often denoted as i
  modified_base 2: mod_base = OTHER; note = misc_feature - bicyclic nucleic acid scaffold modification
  modified_base 13: mod_base = OTHER; note = misc_feature - bicyclic nucleic acid scaffold modification
  modified_base 18: mod_base = OTHER; note = misc_feature - bicyclic nucleic acid scaffold modification
  source 1..18: mol_type = other RNA
nctgcccaatgccatcct

SEQ ID NO: 4071 - RNA, 18 nt, synthetic construct
  modified_base 18: mod_base = OTHER; note = thymine
  misc_feature 1..18: note = Antisense oligonucleotide
  modified_base 1: mod_base = OTHER; note = misc_feature - n is inosine, often denoted as i
  modified_base 2: mod_base = OTHER; note = misc_feature - bicyclic nucleic acid scaffold modification
  modified_base 7: mod_base = OTHER; note = misc_feature - bicyclic nucleic acid scaffold modification
  modified_base 13: mod_base = OTHER; note = misc_feature - bicyclic nucleic acid scaffold modification
  modified_base 18: mod_base = OTHER; note = misc_feature - bicyclic nucleic acid scaffold modification
  source 1..18: mol_type = other RNA
nctgcccaatgccatcct

SEQ ID NO: 4072 - RNA, 18 nt, synthetic construct
  modified_base 18: mod_base = OTHER; note = thymine
  misc_feature 1..18: note = Antisense oligonucleotide
  modified_base 1: mod_base = OTHER; note = misc_feature - n is inosine, often denoted as i
  modified_base 2: mod_base = OTHER; note = misc_feature - bicyclic nucleic acid scaffold modification
  modified_base 7: mod_base = OTHER; note = misc_feature - bicyclic nucleic acid scaffold modification
  modified_base 16: mod_base = OTHER; note = misc_feature - bicyclic nucleic acid scaffold modification
  modified_base 18: mod_base = OTHER; note = misc_feature - bicyclic nucleic acid scaffold modification
  source 1..18: mol_type = other RNA
nctgcccaatgccatcct

SEQ ID NO: 4073 - RNA, 18 nt, synthetic construct
  modified_base 3: mod_base = OTHER; note = thymine
  modified_base 18: mod_base = OTHER; note = thymine
  misc_feature 1..18: note = Antisense oligonucleotide
  modified_base 1: mod_base = OTHER; note = misc_feature - n is inosine, often denoted as i
  modified_base 2..3: mod_base = OTHER; note = misc_feature - bicyclic nucleic acid scaffold modification
  modified_base 17..18: mod_base = OTHER; note = misc_feature - bicyclic nucleic acid scaffold modification
  source 1..18: mol_type = other RNA
nctgcccaatgccatcct

SEQ ID NO: 4074 - RNA, 18 nt, synthetic construct
  modified_base 18: mod_base = OTHER; note = thymine
  misc_feature 1..18: note = Antisense oligonucleotide
  modified_base 1: mod_base = OTHER; note = misc_feature - n is inosine, often denoted as i
  modified_base 2: mod_base = OTHER; note = misc_feature - bicyclic nucleic acid scaffold modification
  modified_base 4: mod_base = OTHER; note = misc_feature - bicyclic nucleic acid scaffold modification
  modified_base 11: mod_base = OTHER; note = misc_feature - bicyclic nucleic acid scaffold modification
  modified_base 17..18: mod_base = OTHER; note = misc_feature - bicyclic nucleic acid scaffold modification
  source 1..18: mol_type = other RNA
nctgcccaatgccatcct

SEQ ID NO: 4075 - RNA, 18 nt, synthetic construct
  modified_base 3: mod_base = OTHER; note = thymine
  modified_base 18: mod_base = OTHER; note = thymine
  misc_feature 1..18: note = Antisense oligonucleotide
  modified_base 1: mod_base = OTHER; note = misc_feature - n is inosine, often denoted as i
  modified_base 2..3: mod_base = OTHER; note = misc_feature - bicyclic nucleic acid scaffold modification
  modified_base 7: mod_base = OTHER; note = misc_feature - bicyclic nucleic acid scaffold modification
  modified_base 13: mod_base = OTHER; note = misc_feature - bicyclic nucleic acid scaffold modification
  modified_base 17..18: mod_base = OTHER; note = misc_feature - bicyclic nucleic acid scaffold modification
  source 1..18: mol_type = other RNA
nctgcccaatgccatcct

SEQ ID NO: 4076 - RNA, 18 nt, synthetic construct
  misc_feature 1..18: note = Antisense oligonucleotide
  modified_base 1: mod_base = OTHER; note = misc_feature - bicyclic nucleic acid scaffold modification
  modified_base 18: mod_base = OTHER; note = misc_feature - bicyclic nucleic acid scaffold modification
  source 1..18: mol_type = other RNA
ctgcccaatgccatcctg

SEQ ID NO: 4077 - RNA, 18 nt, synthetic construct
  misc_feature 1..18: note = Antisense oligonucleotide
  modified_base 1: mod_base = OTHER; note = misc_feature - bicyclic nucleic acid scaffold modification
  modified_base 3: mod_base = OTHER; note = misc_feature - bicyclic nucleic acid scaffold modification
  modified_base 18: mod_base = OTHER; note = misc_feature - bicyclic nucleic acid scaffold modification
  source 1..18: mol_type = other RNA
ctgcccaatgccatcctg

SEQ ID NO: 4078 - RNA, 18 nt, synthetic construct
  misc_feature 1..18: note = Antisense oligonucleotide
  modified_base 1: mod_base = OTHER; note = misc_feature - bicyclic nucleic acid scaffold modification
  modified_base 10: mod_base = OTHER; note = misc_feature - bicyclic nucleic acid scaffold modification
  modified_base 18: mod_base = OTHER; note = misc_feature - bicyclic nucleic acid scaffold modification
  source 1..18: mol_type = other RNA
ctgcccaatgccatcctg

SEQ ID NO: 4079 - RNA, 18 nt, synthetic construct
  misc_feature 1..18: note = Antisense oligonucleotide
  modified_base 1: mod_base = OTHER; note = misc_feature - bicyclic nucleic acid scaffold modification
  modified_base 3: mod_base = OTHER; note = misc_feature - bicyclic nucleic acid scaffold modification
  modified_base 10: mod_base = OTHER; note = misc_feature - bicyclic nucleic acid scaffold modification
  modified_base 18: mod_base = OTHER; note = misc_feature - bicyclic nucleic acid scaffold modification
  source 1..18: mol_type = other RNA
ctgcccaatgccatcctg

SEQ ID NO: 4080 - RNA, 18 nt, synthetic construct
  misc_feature 1..18: note = Antisense oligonucleotide
  modified_base 1: mod_base = OTHER; note = misc_feature - bicyclic nucleic acid scaffold modification
  modified_base 16: mod_base = OTHER; note = misc_feature - bicyclic nucleic acid scaffold modification
  modified_base 18: mod_base = OTHER; note = misc_feature - bicyclic nucleic acid scaffold modification
  source 1..18: mol_type = other RNA
ctgcccaatgccatcctg

SEQ ID NO: 4081 - RNA, 18 nt, synthetic construct
  misc_feature 1..18: note = Antisense oligonucleotide
  modified_base 1: mod_base = OTHER; note = misc_feature - bicyclic nucleic acid scaffold modification
  modified_base 12: mod_base = OTHER; note = misc_feature - bicyclic nucleic acid scaffold modification
  modified_base 18: mod_base = OTHER; note = misc_feature - bicyclic nucleic acid scaffold modification
  source 1..18: mol_type = other RNA
ctgcccaatgccatcctg

SEQ ID NO: 4082 - RNA, 18 nt, synthetic construct
  misc_feature 1..18: note = Antisense oligonucleotide
  modified_base 1: mod_base = OTHER; note = misc_feature - bicyclic nucleic acid scaffold modification
  modified_base 6: mod_base = OTHER; note = misc_feature - bicyclic nucleic acid scaffold modification
  modified_base 18: mod_base = OTHER; note = misc_feature - bicyclic nucleic acid scaffold modification
  source 1..18: mol_type = other RNA
ctgcccaatgccatcctg

SEQ ID NO: 4083 - RNA, 18 nt, synthetic construct
  misc_feature 1..18: note = Antisense oligonucleotide
  modified_base 1: mod_base = OTHER; note = misc_feature - bicyclic nucleic acid scaffold modification
  modified_base 12: mod_base = OTHER; note = misc_feature - bicyclic nucleic acid scaffold modification
  modified_base 16: mod_base = OTHER; note = misc_feature - bicyclic nucleic acid scaffold modification
  modified_base 18: mod_base = OTHER; note = misc_feature - bicyclic nucleic acid scaffold modification
  source 1..18: mol_type = other RNA
ctgcccaatgccatcctg

SEQ ID NO: 4084 - RNA, 18 nt, synthetic construct
  misc_feature 1..18: note = Antisense oligonucleotide
  modified_base 1: mod_base = OTHER; note = misc_feature - bicyclic nucleic acid scaffold modification
  modified_base 6: mod_base = OTHER; note = misc_feature - bicyclic nucleic acid scaffold modification
  modified_base 12: mod_base = OTHER; note = misc_feature - bicyclic nucleic acid scaffold modification
  modified_base 18: mod_base = OTHER; note = misc_feature - bicyclic nucleic acid scaffold modification
  source 1..18: mol_type = other RNA
ctgcccaatgccatcctg

SEQ ID NO: 4085 - RNA, 18 nt, synthetic construct
  modified_base 2: mod_base = OTHER; note = thymine
  modified_base 17: mod_base = OTHER; note = thymine
  misc_feature 1..18: note = Antisense oligonucleotide
  modified_base 1..2: mod_base = OTHER; note = misc_feature - bicyclic nucleic acid scaffold modification
  modified_base 17..18: mod_base = OTHER; note = misc_feature - bicyclic nucleic acid scaffold modification
  source 1..18: mol_type = other RNA
ctgcccaatgccatcctg

SEQ ID NO: 4086 - RNA, 18 nt, synthetic construct
  modified_base 2: mod_base = OTHER; note = thymine
  modified_base 17: mod_base = OTHER; note = thymine
  misc_feature 1..18: note = Antisense oligonucleotide
  modified_base 1..2: mod_base = OTHER; note = misc_feature - bicyclic nucleic acid scaffold modification
  modified_base 10: mod_base = OTHER; note = misc_feature - bicyclic nucleic acid scaffold modification
  modified_base 17..18: mod_base = OTHER; note = misc_feature - bicyclic nucleic acid scaffold modification
  source 1..18: mol_type = other RNA
ctgcccaatgccatcctg

SEQ ID NO: 4087 - RNA, 18 nt, synthetic construct
  modified_base 2: mod_base = OTHER; note = thymine
  modified_base 17: mod_base = OTHER; note = thymine
  misc_feature 1..18: note = Antisense oligonucleotide
  modified_base 1..2: mod_base = OTHER; note = misc_feature - bicyclic nucleic acid scaffold modification
  modified_base 6: mod_base = OTHER; note = misc_feature - bicyclic nucleic acid scaffold modification
  modified_base 12: mod_base = OTHER; note = misc_feature - bicyclic nucleic acid scaffold modification
  modified_base 17..18: mod_base = OTHER; note = misc_feature - bicyclic nucleic acid scaffold modification
  source 1..18: mol_type = other RNA
ctgcccaatgccatcctg

SEQ ID NO: 4088 - RNA, 16 nt, synthetic construct
  modified_base 1: mod_base = OTHER; note = thymine
  modified_base 16: mod_base = OTHER; note = thymine
  misc_feature 1..16: note = Antisense oligonucleotide
  modified_base 1: mod_base = OTHER; note = misc_feature - bicyclic nucleic acid scaffold modification
  modified_base 7: mod_base = OTHER; note = misc_feature - n is inosine, often denoted as i
  modified_base 16: mod_base = OTHER; note = misc_feature - bicyclic nucleic acid scaffold modification
  source 1..16: mol_type = other RNA
tttgccnctgcccaat

SEQ ID NO: 4089 - RNA, 16 nt, synthetic construct
  modified_base 1: mod_base = OTHER; note = thymine
  modified_base 16: mod_base = OTHER; note = thymine
  misc_feature 1..16: note = Antisense oligonucleotide
  modified_base 1: mod_base = OTHER; note = misc_feature - bicyclic nucleic acid scaffold modification
  modified_base 4: mod_base = OTHER; note = misc_feature - bicyclic nucleic acid scaffold modification
  modified_base 7: mod_base = OTHER; note = misc_feature - n is inosine, often denoted as i
  modified_base 16: mod_base = OTHER; note = misc_feature - bicyclic nucleic acid scaffold modification
  source 1..16: mol_type = other RNA
tttgccnctgcccaat

SEQ ID NO: 4090 - RNA, 16 nt, synthetic construct
  modified_base 1: mod_base = OTHER; note = thymine
  modified_base 16: mod_base = OTHER; note = thymine
  misc_feature 1..16: note = Antisense oligonucleotide
  modified_base 1: mod_base = OTHER; note = misc_feature - bicyclic nucleic acid scaffold modification
  modified_base 7: mod_base = OTHER; note = misc_feature - n is inosine, often denoted as i
  modified_base 10: mod_base = OTHER; note = misc_feature - bicyclic nucleic acid scaffold modification
  modified_base 16: mod_base = OTHER; note = misc_feature - bicyclic nucleic acid scaffold modification
  source 1..16: mol_type = other RNA
tttgccnctgcccaat

SEQ ID NO: 4091 - RNA, 16 nt, synthetic construct
  modified_base 1: mod_base = OTHER; note = thymine
  modified_base 16: mod_base = OTHER; note = thymine
  misc_feature 1..16: note = Antisense oligonucleotide
  modified_base 1: mod_base = OTHER; note = misc_feature - bicyclic nucleic acid scaffold modification
  modified_base 4: mod_base = OTHER; note = misc_feature - bicyclic nucleic acid scaffold modification
  modified_base 7: mod_base = OTHER; note = misc_feature - n is inosine, often denoted as i
  modified_base 10: mod_base = OTHER; note = misc_feature - bicyclic nucleic acid scaffold modification
  modified_base 16: mod_base = OTHER; note = misc_feature - bicyclic nucleic acid scaffold modification
  source 1..16: mol_type = other RNA
tttgccnctgcccaat

SEQ ID NO: 4092 - RNA, 16 nt, synthetic construct
  modified_base 1: mod_base = OTHER; note = thymine
  modified_base 16: mod_base = OTHER; note = thymine
  misc_feature 1..16: note = Antisense oligonucleotide
  modified_base 1: mod_base = OTHER; note = misc_feature - bicyclic nucleic acid scaffold modification
  modified_base 7: mod_base = OTHER; note = misc_feature - n is inosine, often denoted as i
  modified_base 13: mod_base = OTHER; note = misc_feature - bicyclic nucleic acid scaffold modification
  modified_base 16: mod_base = OTHER; note = misc_feature - bicyclic nucleic acid scaffold modification
  source 1..16: mol_type = other RNA
tttgccnctgcccaat

SEQ ID NO: 4093 - RNA, 16 nt, synthetic construct
  modified_base 1: mod_base = OTHER; note = thymine
  modified_base 16: mod_base = OTHER; note = thymine
  misc_feature 1..16: note = Antisense oligonucleotide
  modified_base 1: mod_base = OTHER; note = misc_feature - bicyclic nucleic acid scaffold modification
  modified_base 7: mod_base = OTHER; note = misc_feature - n is inosine, often denoted as i
  modified_base 8: mod_base = OTHER; note = misc_feature - bicyclic nucleic acid scaffold modification
  modified_base 13: mod_base = OTHER; note = misc_feature - bicyclic nucleic acid scaffold modification
  modified_base 16: mod_base = OTHER; note = misc_feature - bicyclic nucleic acid scaffold modification
  source 1..16: mol_type = other RNA
tttgccnctgcccaat

SEQ ID NO: 4094 - RNA, 16 nt, synthetic construct
  modified_base 1: mod_base = OTHER; note = thymine
  modified_base 16: mod_base = OTHER; note = thymine
  misc_feature 1..16: note = Antisense oligonucleotide
  modified_base 1: mod_base = OTHER; note = misc_feature - bicyclic nucleic acid scaffold modification
  modified_base 7: mod_base = OTHER; note = misc_feature - n is inosine, often denoted as i
  modified_base 8: mod_base = OTHER; note = misc_feature - bicyclic nucleic acid scaffold modification
  modified_base 16: mod_base = OTHER; note = misc_feature - bicyclic nucleic acid scaffold modification
  source 1..16: mol_type = other RNA
tttgccnctgcccaat

SEQ ID NO: 4095 - RNA, 16 nt, synthetic construct
  modified_base 1: mod_base = OTHER; note = thymine
  modified_base 16: mod_base = OTHER; note = thymine
  misc_feature 1..16: note = Antisense oligonucleotide
  modified_base 1: mod_base = OTHER; note = misc_feature - bicyclic nucleic acid scaffold modification
  modified_base 6: mod_base = OTHER; note = misc_feature - bicyclic nucleic acid scaffold modification
  modified_base 7: mod_base = OTHER; note = misc_feature - n is inosine, often denoted as i
  modified_base 12: mod_base = OTHER; note = misc_feature - bicyclic nucleic acid scaffold modification
  modified_base 16: mod_base = OTHER; note = misc_feature - bicyclic nucleic acid scaffold modification
  source 1..16: mol_type = other RNA
tttgccnctgcccaat

SEQ ID NO: 4096 - RNA, 16 nt, synthetic construct
  modified_base 1..2: mod_base = OTHER; note = thymine
  modified_base 16: mod_base = OTHER; note = thymine
  misc_feature 1..16: note = Antisense oligonucleotide
  modified_base 1..2: mod_base = OTHER; note = misc_feature - bicyclic nucleic acid scaffold modification
  modified_base 7: mod_base = OTHER; note = misc_feature - n is inosine, often denoted as i
  modified_base 15..16: mod_base = OTHER; note = misc_feature - bicyclic nucleic acid scaffold modification
  source 1..16: mol_type = other RNA
tttgccnctgcccaat

SEQ ID NO: 4097 - RNA, 16 nt, synthetic construct
  modified_base 1..2: mod_base = OTHER; note = thymine
  modified_base 16: mod_base = OTHER; note = thymine
  misc_feature 1..16: note = Antisense oligonucleotide
  modified_base 1..2: mod_base = OTHER; note = misc_feature - bicyclic nucleic acid scaffold modification
  modified_base 7: mod_base = OTHER; note = misc_feature - n is inosine, often denoted as i
  modified_base 10: mod_base = OTHER; note = misc_feature - bicyclic nucleic acid scaffold modification
  modified_base 15..16: mod_base = OTHER; note = misc_feature - bicyclic nucleic acid scaffold modification
  source 1..16: mol_type = other RNA
tttgccnctgcccaat

SEQ ID NO: 4098 - RNA, 16 nt, synthetic construct
  modified_base 1..2: mod_base = OTHER; note = thymine
  modified_base 16: mod_base = OTHER; note = thymine
  misc_feature 1..16: note = Antisense oligonucleotide
  modified_base 1..2: mod_base = OTHER; note = misc_feature - bicyclic nucleic acid scaffold modification
  modified_base 7: mod_base = OTHER; note = misc_feature - n is inosine, often denoted as i
  modified_base 8: mod_base = OTHER; note = misc_feature - bicyclic nucleic acid scaffold modification
  modified_base 15..16: mod_base = OTHER; note = misc_feature - bicyclic nucleic acid scaffold modification
  source 1..16: mol_type = other RNA
tttgccnctgcccaat

SEQ ID NO: 4099 - RNA, 16 nt, synthetic construct
  modified_base 1: mod_base = OTHER; note = thymine
  misc_feature 1..16: note = Antisense oligonucleotide
  modified_base 1: mod_base = OTHER; note = misc_feature - bicyclic nucleic acid scaffold modification
  modified_base 6: mod_base = OTHER; note = misc_feature - n is inosine, often denoted as i
  modified_base 16: mod_base = OTHER; note = misc_feature - bicyclic nucleic acid scaffold modification
  source 1..16: mol_type = other RNA
ttgccnctgcccaatg

SEQ ID NO: 4100 - RNA, 16 nt, synthetic construct
  modified_base 1: mod_base = OTHER; note = thymine
  misc_feature 1..16: note = Antisense oligonucleotide
  modified_base 1: mod_base = OTHER; note = misc_feature - bicyclic nucleic acid scaffold modification
  modified_base 6: mod_base = OTHER; note = misc_feature - n is inosine, often denoted as i
  modified_base 12: mod_base = OTHER; note = misc_feature - bicyclic nucleic acid scaffold modification
  modified_base 16: mod_base = OTHER; note = misc_feature - bicyclic nucleic acid scaffold modification
  source 1..16: mol_type = other RNA
ttgccnctgcccaatg

SEQ ID NO: 4101 - RNA, 16 nt, synthetic construct
  modified_base 1: mod_base = OTHER; note = thymine
  misc_feature 1..16: note = Antisense oligonucleotide
  modified_base 1: mod_base = OTHER; note = misc_feature - bicyclic nucleic acid scaffold modification
  modified_base 6: mod_base = OTHER; note = misc_feature - n is inosine, often denoted as i
  modified_base 9: mod_base = OTHER; note = misc_feature - bicyclic nucleic acid scaffold modification
  modified_base 16: mod_base = OTHER; note = misc_feature - bicyclic nucleic acid scaffold modification
  source 1..16: mol_type = other RNA
ttgccnctgcccaatg

SEQ ID NO: 4102 - RNA, 16 nt, synthetic construct
  modified_base 1: mod_base = OTHER; note = thymine
  misc_feature 1..16: note = Antisense oligonucleotide
  modified_base 1: mod_base = OTHER; note = misc_feature - bicyclic nucleic acid scaffold modification
  modified_base 6: mod_base = OTHER; note = misc_feature - n is inosine, often denoted as i
  modified_base 7: mod_base = OTHER; note = misc_feature - bicyclic nucleic acid scaffold modification
  modified_base 16: mod_base = OTHER; note = misc_feature - bicyclic nucleic acid scaffold modification
  source 1..16: mol_type = other RNA
ttgccnctgcccaatg

SEQ ID NO: 4103 - RNA, 16 nt, synthetic construct
  modified_base 1: mod_base = OTHER; note = thymine
  misc_feature 1..16: note = Antisense oligonucleotide
  modified_base 1: mod_base = OTHER; note = misc_feature - bicyclic nucleic acid scaffold modification
  modified_base 3: mod_base = OTHER; note = misc_feature - bicyclic nucleic acid scaffold modification
  modified_base 6: mod_base = OTHER; note = misc_feature - n is inosine, often denoted as i
  modified_base 16: mod_base = OTHER; note = misc_feature - bicyclic nucleic acid scaffold modification
  source 1..16: mol_type = other RNA
ttgccnctgcccaatg

SEQ ID NO: 4104 - RNA, 16 nt, synthetic construct
  modified_base 1: mod_base = OTHER; note = thymine
  misc_feature 1..16: note = Antisense oligonucleotide
  modified_base 1: mod_base = OTHER; note = misc_feature - bicyclic nucleic acid scaffold modification
  modified_base 3: mod_base = OTHER; note = misc_feature - bicyclic nucleic acid scaffold modification
  modified_base 6: mod_base = OTHER; note = misc_feature - n is inosine, often denoted as i
  modified_base 9: mod_base = OTHER; note = misc_feature - bicyclic nucleic acid scaffold modification
  modified_base 16: mod_base = OTHER; note = misc_feature - bicyclic nucleic acid scaffold modification
  source 1..16: mol_type = other RNA
ttgccnctgcccaatg

SEQ ID NO: 4105 - RNA, 16 nt, synthetic construct
  modified_base 1: mod_base = OTHER; note = thymine
  misc_feature 1..16: note = Antisense oligonucleotide
  modified_base 1: mod_base = OTHER; note = misc_feature - bicyclic nucleic acid scaffold modification
  modified_base 6: mod_base = OTHER; note = misc_feature - n is inosine, often denoted as i
  modified_base 7: mod_base = OTHER; note = misc_feature - bicyclic nucleic acid scaffold modification
  modified_base 12: mod_base = OTHER; note = misc_feature - bicyclic nucleic acid scaffold modification
  modified_base 16: mod_base = OTHER; note = misc_feature - bicyclic nucleic acid scaffold modification
  source 1..16: mol_type = other RNA
ttgccnctgcccaatg

SEQ ID NO: 4106 - RNA, 16 nt, synthetic construct
  modified_base 1: mod_base = OTHER; note = thymine
  misc_feature 1..16: note = Antisense oligonucleotide
  modified_base 1: mod_base = OTHER; note = misc_feature - bicyclic nucleic acid scaffold modification
  modified_base 4: mod_base = OTHER; note = misc_feature - bicyclic nucleic acid scaffold modification
  modified_base 6: mod_base = OTHER; note = misc_feature - n is inosine, often denoted as i
  modified_base 9: mod_base = OTHER; note = misc_feature - bicyclic nucleic acid scaffold modification
  modified_base 12: mod_base = OTHER; note = misc_feature - bicyclic nucleic acid scaffold modification
  modified_base 16: mod_base = OTHER; note = misc_feature - bicyclic nucleic acid scaffold modification
  source 1..16: mol_type = other RNA
ttgccnctgcccaatg

SEQ ID NO: 4107 - RNA, 16 nt, synthetic construct
  modified_base 1..2: mod_base = OTHER; note = thymine
  modified_base 15: mod_base = OTHER; note = thymine
  misc_feature 1..16: note = Antisense oligonucleotide
  modified_base 1..2: mod_base = OTHER; note = misc_feature - bicyclic nucleic acid scaffold modification
  modified_base 6: mod_base = OTHER; note = misc_feature - n is inosine, often denoted as i
  modified_base 9: mod_base = OTHER; note = misc_feature - bicyclic nucleic acid scaffold modification
  modified_base 15..16: mod_base = OTHER; note = misc_feature - bicyclic nucleic acid scaffold modification
  source 1..16: mol_type = other RNA
ttgccnctgcccaatg

SEQ ID NO: 4108 - RNA, 16 nt, synthetic construct
  modified_base 1..2: mod_base = OTHER; note = thymine
  modified_base 15: mod_base = OTHER; note = thymine
  misc_feature 1..16: note = Antisense oligonucleotide
  modified_base 1..2: mod_base = OTHER; note = misc_feature - bicyclic nucleic acid scaffold modification
  modified_base 6: mod_base = OTHER; note = misc_feature - n is inosine, often denoted as i
  modified_base 15..16: mod_base = OTHER; note = misc_feature - bicyclic nucleic acid scaffold modification
  source 1..16: mol_type = other RNA
ttgccnctgcccaatg

SEQ ID NO: 4109 - RNA, 16 nt, synthetic construct
  modified_base 1..2: mod_base = OTHER; note = thymine
  modified_base 15: mod_base = OTHER; note = thymine
  misc_feature 1..16: note = Antisense oligonucleotide
  modified_base 1..2: mod_base = OTHER; note = misc_feature - bicyclic nucleic acid scaffold modification
  modified_base 6: mod_base = OTHER; note = misc_feature - n is inosine, often denoted as i
  modified_base 7: mod_base = OTHER; note = misc_feature - bicyclic nucleic acid scaffold modification
  modified_base 12: mod_base = OTHER; note = misc_feature - bicyclic nucleic acid scaffold modification
  modified_base 15..16: mod_base = OTHER; note = misc_feature - bicyclic nucleic acid scaffold modification
  source 1..16: mol_type = other RNA
ttgccnctgcccaatg

SEQ ID NO: 4110 - RNA, 16 nt, synthetic construct
  modified_base 1: mod_base = OTHER; note = thymine
  misc_feature 1..16: note = Antisense oligonucleotide
  modified_base 1: mod_base = OTHER; note = misc_feature - bicyclic nucleic acid scaffold modification
  modified_base 5: mod_base = OTHER; note = misc_feature - n is inosine, often denoted as i
  modified_base 16: mod_base = OTHER; note = misc_feature - bicyclic nucleic acid scaffold modification
  source 1..16: mol_type = other RNA
tgccnctgcccaatgc

SEQ ID NO: 4111 - RNA, 16 nt, synthetic construct
  modified_base 1: mod_base = OTHER; note = thymine
  misc_feature 1..16: note = Antisense oligonucleotide
  modified_base 1: mod_base = OTHER; note = misc_feature - bicyclic nucleic acid scaffold modification
  modified_base 5: mod_base = OTHER; note = misc_feature - n is inosine, often denoted as i
  modified_base 15..16: mod_base = OTHER; note = misc_feature - bicyclic nucleic acid scaffold modification
  source 1..16: mol_type = other RNA
tgccnctgcccaatgc

SEQ ID NO: 4112 - RNA, 16 nt, synthetic construct
  modified_base 1: mod_base = OTHER; note = thymine
  misc_feature 1..16: note = Antisense oligonucleotide
  modified_base 1: mod_base = OTHER; note = misc_feature - bicyclic nucleic acid scaffold modification
  modified_base 5: mod_base = OTHER; note = misc_feature - n is inosine, often denoted as i
  modified_base 8: mod_base = OTHER; note = misc_feature - bicyclic nucleic acid scaffold modification
  modified_base 16: mod_base = OTHER; note = misc_feature - bicyclic nucleic acid scaffold modification
  source 1..16: mol_type = other RNA
tgccnctgcccaatgc

SEQ ID NO: 4113 - RNA, 16 nt, synthetic construct
  modified_base 1: mod_base = OTHER; note = thymine
  misc_feature 1..16: note = Antisense oligonucleotide
  modified_base 1..2: mod_base = OTHER; note = misc_feature - bicyclic nucleic acid scaffold modification
  modified_base 5: mod_base = OTHER; note = misc_feature - n is inosine, often denoted as i
  modified_base 16: mod_base = OTHER; note = misc_feature - bicyclic nucleic acid scaffold modification
  source 1..16: mol_type = other RNA
tgccnctgcccaatgc

SEQ ID NO: 4114 - RNA, 16 nt, synthetic construct
  modified_base 1: mod_base = OTHER; note = thymine
  misc_feature 1..16: note = Antisense oligonucleotide
  modified_base 1: mod_base = OTHER; note = misc_feature - bicyclic nucleic acid scaffold modification
  modified_base 5: mod_base = OTHER; note = misc_feature - n is inosine, often denoted as i
  modified_base 8: mod_base = OTHER; note = misc_feature - bicyclic nucleic acid scaffold modification
  modified_base 15..16: mod_base = OTHER; note = misc_feature - bicyclic nucleic acid scaffold modification
  source 1..16: mol_type = other RNA
tgccnctgcccaatgc

SEQ ID NO: 4115 - RNA, 16 nt, synthetic construct
  modified_base 1: mod_base = OTHER; note = thymine
  misc_feature 1..16: note = Antisense oligonucleotide
  modified_base 1..2: mod_base = OTHER; note = misc_feature - bicyclic nucleic acid scaffold modification
  modified_base 5: mod_base = OTHER; note = misc_feature - n is inosine, often denoted as i
  modified_base 8: mod_base = OTHER; note = misc_feature - bicyclic nucleic acid scaffold modification
  modified_base 16: mod_base = OTHER; note = misc_feature - bicyclic nucleic acid scaffold modification
  source 1..16: mol_type = other RNA
tgccnctgcccaatgc

SEQ ID NO: 4116 - RNA, 16 nt, synthetic construct
  modified_base 1: mod_base = OTHER; note = thymine
  misc_feature 1..16: note = Antisense oligonucleotide
  modified_base 1: mod_base = OTHER; note = misc_feature - bicyclic nucleic acid scaffold modification
  modified_base 5: mod_base = OTHER; note = misc_feature - n is inosine, often denoted as i
  modified_base 6: mod_base = OTHER; note = misc_feature - bicyclic nucleic acid scaffold modification
  modified_base 16: mod_base = OTHER; note = misc_feature - bicyclic nucleic acid scaffold modification
  source 1..16: mol_type = other RNA
tgccnctgcccaatgc

SEQ ID NO: 4117 - RNA, 16 nt, synthetic construct
  modified_base 1: mod_base = OTHER; note = thymine
  misc_feature 1..16: note = Antisense oligonucleotide
  modified_base 1: mod_base = OTHER; note = misc_feature - bicyclic nucleic acid scaffold modification
  modified_base 5: mod_base = OTHER; note = misc_feature - n is inosine, often denoted as i
  modified_base 11: mod_base = OTHER; note = misc_feature - bicyclic nucleic acid scaffold modification
  modified_base 16: mod_base = OTHER; note = misc_feature - bicyclic nucleic acid scaffold modification
  source 1..16: mol_type = other RNA
tgccnctgcccaatgc

SEQ ID NO: 4118 - RNA, 16 nt, synthetic construct
  modified_base 1: mod_base = OTHER; note = thymine
  misc_feature 1..16: note = Antisense oligonucleotide
  modified_base 1: mod_base = OTHER; note = misc_feature - bicyclic nucleic acid scaffold modification
  modified_base 5: mod_base = OTHER; note = misc_feature - n is inosine, often denoted as i
  modified_base 6: mod_base = OTHER; note = misc_feature - bicyclic nucleic acid scaffold modification
  modified_base 11: mod_base = OTHER; note = misc_feature - bicyclic nucleic acid scaffold modification
  modified_base 16: mod_base = OTHER; note = misc_feature - bicyclic nucleic acid scaffold modification
  source 1..16: mol_type = other RNA
tgccnctgcccaatgc

SEQ ID NO: 4119 - RNA, 16 nt, synthetic construct
  modified_base 1: mod_base = OTHER; note = thymine
  misc_feature 1..16: note = Antisense oligonucleotide
  modified_base 1..2: mod_base = OTHER; note = misc_feature - bicyclic nucleic acid scaffold modification
  modified_base 5: mod_base = OTHER; note = misc_feature - n is inosine, often denoted as i
  modified_base 15..16: mod_base = OTHER; note = misc_feature - bicyclic nucleic acid scaffold modification
  source 1..16: mol_type = other RNA
tgccnctgcccaatgc

SEQ ID NO: 4120 - RNA, 16 nt, synthetic construct
  modified_base 1: mod_base = OTHER; note = thymine
  misc_feature 1..16: note = Antisense oligonucleotide
  modified_base 1..2: mod_base = OTHER; note = misc_feature - bicyclic nucleic acid scaffold modification
  modified_base 5: mod_base = OTHER; note = misc_feature - n is inosine, often denoted as i
  modified_base 8: mod_base = OTHER; note = misc_feature - bicyclic nucleic acid scaffold modification
  modified_base 15..16: mod_base = OTHER; note = misc_feature - bicyclic nucleic acid scaffold modification
  source 1..16: mol_type = other RNA
tgccnctgcccaatgc

SEQ ID NO: 4121 - RNA, 16 nt, synthetic construct
  modified_base 1: mod_base = OTHER; note = thymine
  misc_feature 1..16: note = Antisense oligonucleotide
  modified_base 1..2: mod_base = OTHER; note = misc_feature - bicyclic nucleic acid scaffold modification
  modified_base 5: mod_base = OTHER; note = misc_feature - n is inosine, often denoted as i
  modified_base 8: mod_base = OTHER; note = misc_feature - bicyclic nucleic acid scaffold modification
  modified_base 11: mod_base = OTHER; note = misc_feature - bicyclic nucleic acid scaffold modification
  modified_base 15..16: mod_base = OTHER; note = misc_feature - bicyclic nucleic acid scaffold modification
  source 1..16: mol_type = other RNA
tgccnctgcccaatgc

SEQ ID NO: 4122 - RNA, 16 nt, synthetic construct
  misc_feature 1..16: note = Antisense oligonucleotide
  modified_base 1: mod_base = OTHER; note = misc_feature - bicyclic nucleic acid scaffold modification
  modified_base 4: mod_base = OTHER; note = misc_feature - n is inosine, often denoted as i
  modified_base 16: mod_base = OTHER; note = misc_feature - bicyclic nucleic acid scaffold modification
  source 1..16: mol_type = other RNA
gccnctgcccaatgcc

SEQ ID NO: 4123 - RNA, 16 nt, synthetic construct
  misc_feature 1..16: note = Antisense oligonucleotide
  modified_base 1: mod_base = OTHER; note = misc_feature - bicyclic nucleic acid scaffold modification
  modified_base 4: mod_base = OTHER; note = misc_feature - n is inosine, often denoted as i
  modified_base 7: mod_base = OTHER; note = misc_feature - bicyclic nucleic acid scaffold modification
  modified_base 16: mod_base = OTHER; note = misc_feature - bicyclic nucleic acid scaffold modification
  source 1..16: mol_type = other RNA
gccnctgcccaatgcc

SEQ ID NO: 4124 - RNA, 16 nt, synthetic construct
  misc_feature 1..16: note = Antisense oligonucleotide
  modified_base 1: mod_base = OTHER; note = misc_feature - bicyclic nucleic acid scaffold modification
  modified_base 4: mod_base = OTHER; note = misc_feature - n is inosine, often denoted as i
  modified_base 14: mod_base = OTHER; note = misc_feature - bicyclic nucleic acid scaffold modification
  modified_base 16: mod_base = OTHER; note = misc_feature - bicyclic nucleic acid scaffold modification
  source 1..16: mol_type = other RNA
gccnctgcccaatgcc

SEQ ID NO: 4125 - RNA, 16 nt, synthetic construct
  misc_feature 1..16: note = Antisense oligonucleotide
  modified_base 1: mod_base = OTHER; note = misc_feature - bicyclic nucleic acid scaffold modification
  modified_base 4: mod_base = OTHER; note = misc_feature - n is inosine, often denoted as i
  modified_base 7: mod_base = OTHER; note = misc_feature - bicyclic nucleic acid scaffold modification
  modified_base 14: mod_base = OTHER; note = misc_feature - bicyclic nucleic acid scaffold modification
  modified_base 16: mod_base = OTHER; note = misc_feature - bicyclic nucleic acid scaffold modification
  source 1..16: mol_type = other RNA
gccnctgcccaatgcc

SEQ ID NO: 4126 - RNA, 16 nt, synthetic construct
  misc_feature 1..16: note = Antisense oligonucleotide
  modified_base 1: mod_base = OTHER; note = misc_feature - bicyclic nucleic acid scaffold modification
  modified_base 4: mod_base = OTHER; note = misc_feature - n is inosine, often denoted as i
  modified_base 10: mod_base = OTHER; note = misc_feature - bicyclic nucleic acid scaffold modification
  modified_base 16: mod_base = OTHER; note = misc_feature - bicyclic nucleic acid scaffold modification
  source 1..16: mol_type = other RNA
gccnctgcccaatgcc

SEQ ID NO: 4127 - RNA, 16 nt, synthetic construct
  misc_feature 1..16: note = Antisense oligonucleotide
  modified_base 1: mod_base = OTHER; note = misc_feature - bicyclic nucleic acid scaffold modification
  modified_base 4: mod_base = OTHER; note = misc_feature - n is inosine, often denoted as i
  modified_base 5: mod_base = OTHER; note = misc_feature - bicyclic nucleic acid scaffold modification
  modified_base 16: mod_base = OTHER; note = misc_feature - bicyclic nucleic acid scaffold modification
  source 1..16: mol_type = other RNA
gccnctgcccaatgcc

SEQ ID NO: 4128 - RNA, 16 nt, synthetic construct
  misc_feature 1..16: note = Antisense oligonucleotide
  modified_base 1: mod_base = OTHER; note = misc_feature - bicyclic nucleic acid scaffold modification
  modified_base 4: mod_base = OTHER; note = misc_feature - n is inosine, often denoted as i
  modified_base 5: mod_base = OTHER; note = misc_feature - bicyclic nucleic acid scaffold modification
  modified_base 10: mod_base = OTHER; note = misc_feature - bicyclic nucleic acid scaffold modification
  modified_base 16: mod_base = OTHER; note = misc_feature - bicyclic nucleic acid scaffold modification
  source 1..16: mol_type = other RNA
gccnctgcccaatgcc

SEQ ID NO: 4129 - RNA, 16 nt, synthetic construct
  misc_feature 1..16: note = Antisense oligonucleotide
  modified_base 1: mod_base = OTHER; note = misc_feature - bicyclic nucleic acid scaffold modification
  modified_base 4: mod_base = OTHER; note = misc_feature - n is inosine, often denoted as i
  modified_base 5: mod_base = OTHER; note = misc_feature - bicyclic nucleic acid scaffold modification
  modified_base 7: mod_base = OTHER; note = misc_feature - bicyclic nucleic acid scaffold modification
  modified_base 14: mod_base = OTHER; note = misc_feature - bicyclic nucleic acid scaffold modification
  modified_base 16: mod_base = OTHER; note = misc_feature - bicyclic nucleic acid scaffold modification
  source 1..16: mol_type = other RNA
gccnctgcccaatgcc

SEQ ID NO: 4130 - RNA, 16 nt, synthetic construct
  misc_feature 1..16: note = Antisense oligonucleotide
  modified_base 1..2: mod_base = OTHER; note = misc_feature - bicyclic nucleic acid scaffold modification
  modified_base 4: mod_base = OTHER; note = misc_feature - n is inosine, often denoted as i
  modified_base 15..16: mod_base = OTHER; note = misc_feature - bicyclic nucleic acid scaffold modification
  source 1..16: mol_type = other RNA
gccnctgcccaatgcc

SEQ ID NO: 4131 - RNA, 16 nt, synthetic construct
  misc_feature 1..16: note = Antisense oligonucleotide
  modified_base 1..2: mod_base = OTHER; note = misc_feature - bicyclic nucleic acid scaffold modification
  modified_base 4: mod_base = OTHER; note = misc_feature - n is inosine, often denoted as i
  modified_base 7: mod_base = OTHER; note = misc_feature - bicyclic nucleic acid scaffold modification
  modified_base 10: mod_base = OTHER; note = misc_feature - bicyclic nucleic acid scaffold modification
  modified_base 15..16: mod_base = OTHER; note = misc_feature - bicyclic nucleic acid scaffold modification
  source 1..16: mol_type = other RNA
gccnctgcccaatgcc

SEQ ID NO: 4132 - RNA, 16 nt, synthetic construct
  misc_feature 1..16: note = Antisense oligonucleotide
  modified_base 1..2: mod_base = OTHER; note = misc_feature - bicyclic nucleic acid scaffold modification
  modified_base 4: mod_base = OTHER; note = misc_feature - n is inosine, often denoted as i
  modified_base 5: mod_base = OTHER; note = misc_feature - bicyclic nucleic acid scaffold modification
  modified_base 10: mod_base = OTHER; note = misc_feature - bicyclic nucleic acid scaffold modification
  modified_base 15..16: mod_base = OTHER; note = misc_feature - bicyclic nucleic acid scaffold modification
  source 1..16: mol_type = other RNA
gccnctgcccaatgcc

SEQ ID NO: 4133 - RNA, 16 nt, synthetic construct
  misc_feature 1..16: note = Antisense oligonucleotide
  modified_base 1: mod_base = OTHER; note = misc_feature - bicyclic nucleic acid scaffold modification
  modified_base 3: mod_base = OTHER; note = misc_feature - n is inosine, often denoted as i
  modified_base 16: mod_base = OTHER; note = misc_feature - bicyclic nucleic acid scaffold modification
  source 1..16: mol_type = other RNA
ccnctgcccaatgcca

SEQ ID NO: 4134 - RNA, 16 nt, synthetic construct
  misc_feature 1..16: note = Antisense oligonucleotide
  modified_base 1: mod_base = OTHER; note = misc_feature - bicyclic nucleic acid scaffold modification
  modified_base 3: mod_base = OTHER; note = misc_feature - n is inosine, often denoted as i
  modified_base 6: mod_base = OTHER; note = misc_feature - bicyclic nucleic acid scaffold modification
  modified_base 16: mod_base = OTHER; note = misc_feature - bicyclic nucleic acid scaffold modification
  source 1..16: mol_type = other RNA
ccnctgcccaatgcca

SEQ ID NO: 4135 - RNA, 16 nt, synthetic construct
  misc_feature 1..16: note = Antisense oligonucleotide
  modified_base 1: mod_base = OTHER; note = misc_feature - bicyclic nucleic acid scaffold modification
  modified_base 3: mod_base = OTHER; note = misc_feature - n is inosine, often denoted as i
  modified_base 13: mod_base = OTHER; note = misc_feature - bicyclic nucleic acid scaffold modification
  modified_base 16: mod_base = OTHER; note = misc_feature - bicyclic nucleic acid scaffold modification
  source 1..16: mol_type = other RNA
ccnctgcccaatgcca

SEQ ID NO: 4136 - RNA, 16 nt, synthetic construct
  misc_feature 1..16: note = Antisense oligonucleotide
  modified_base 1: mod_base = OTHER; note = misc_feature - bicyclic nucleic acid scaffold modification
  modified_base 3: mod_base = OTHER; note = misc_feature - n is inosine, often denoted as i
  modified_base 6: mod_base = OTHER; note = misc_feature - bicyclic nucleic acid scaffold modification
  modified_base 13: mod_base = OTHER; note = misc_feature - bicyclic nucleic acid scaffold modification
  modified_base 16: mod_base = OTHER; note = misc_feature - bicyclic nucleic acid scaffold modification
  source 1..16: mol_type = other RNA
ccnctgcccaatgcca

SEQ ID NO: 4137 - RNA, 16 nt, synthetic construct
  misc_feature 1..16: note = Antisense oligonucleotide
  modified_base 1: mod_base = OTHER; note = misc_feature - bicyclic nucleic acid scaffold modification
  modified_base 3: mod_base = OTHER; note = misc_feature - n is inosine, often denoted as i
  modified_base 9: mod_base = OTHER; note = misc_feature - bicyclic nucleic acid scaffold modification
  modified_base 16: mod_base = OTHER; note = misc_feature - bicyclic nucleic acid scaffold modification
  source 1..16: mol_type = other RNA
ccnctgcccaatgcca

SEQ ID NO: 4138 - RNA, 16 nt, synthetic construct
  misc_feature 1..16: note = Antisense oligonucleotide
  modified_base 1: mod_base = OTHER; note = misc_feature - bicyclic nucleic acid scaffold modification
  modified_base 3: mod_base = OTHER; note = misc_feature - n is inosine, often denoted as i
  modified_base 4: mod_base = OTHER; note = misc_feature - bicyclic nucleic acid scaffold modification
  modified_base 16: mod_base = OTHER; note = misc_feature - bicyclic nucleic acid scaffold modification
  source 1..16: mol_type = other RNA
ccnctgcccaatgcca

SEQ ID NO: 4139 - RNA, 16 nt, synthetic construct
  misc_feature 1..16: note = Antisense oligonucleotide
  modified_base 1: mod_base = OTHER; note = misc_feature - bicyclic nucleic acid scaffold modification
  modified_base 3: mod_base = OTHER; note = misc_feature - n is inosine, often denoted as i
  modified_base 4: mod_base = OTHER; note = misc_feature - bicyclic nucleic acid scaffold modification
  modified_base 9: mod_base = OTHER; note = misc_feature - bicyclic nucleic acid scaffold modification
  modified_base 16: mod_base = OTHER; note = misc_feature - bicyclic nucleic acid scaffold modification
  source 1..16: mol_type = other RNA
ccnctgcccaatgcca

SEQ ID NO: 4140 - RNA, 16 nt, synthetic construct
  misc_feature 1..16: note = Antisense oligonucleotide
  modified_base 1..2: mod_base = OTHER; note = misc_feature - bicyclic nucleic acid scaffold modification
  modified_base 3: mod_base = OTHER; note = misc_feature - n is inosine, often denoted as i
  modified_base 15..16: mod_base = OTHER; note = misc_feature - bicyclic nucleic acid scaffold modification
  source 1..16: mol_type = other RNA
ccnctgcccaatgcca

SEQ ID NO: 4141 - RNA, 16 nt, synthetic construct
  misc_feature 1..16: note = Antisense oligonucleotide
  modified_base 1..2: mod_base = OTHER; note = misc_feature - bicyclic nucleic acid scaffold modification
  modified_base 3: mod_base = OTHER; note = misc_feature - n is inosine, often denoted as i
  modified_base 6: mod_base = OTHER; note = misc_feature - bicyclic nucleic acid scaffold modification
  modified_base 15..16: mod_base = OTHER; note = misc_feature - bicyclic nucleic acid scaffold modification
  source 1..16: mol_type = other RNA
ccnctgcccaatgcca

SEQ ID NO: 4142 - RNA, 16 nt, synthetic construct
  misc_feature 1..16: note = Antisense oligonucleotide
  modified_base 1..2: mod_base = OTHER; note = misc_feature - bicyclic nucleic acid scaffold modification
  modified_base 3: mod_base = OTHER; note = misc_feature - n is inosine, often denoted as i
  modified_base 9: mod_base = OTHER; note = misc_feature - bicyclic nucleic acid scaffold modification
  modified_base 15..16: mod_base = OTHER; note = misc_feature - bicyclic nucleic acid scaffold modification
  source 1..16: mol_type = other RNA
ccnctgcccaatgcca

SEQ ID NO: 4143 - RNA, 16 nt, synthetic construct
  misc_feature 1..16: note = Antisense oligonucleotide
  modified_base 1..2: mod_base = OTHER; note = misc_feature - bicyclic nucleic acid scaffold modification
  modified_base 3: mod_base = OTHER; note = misc_feature - n is inosine, often denoted as i
  modified_base 8..9: mod_base = OTHER; note = misc_feature - bicyclic nucleic acid scaffold modification
  modified_base 15..16: mod_base = OTHER; note = misc_feature - bicyclic nucleic acid scaffold modification
  source 1..16: mol_type = other RNA
ccnctgcccaatgcca

SEQ ID NO: 4144 - RNA, 16 nt, synthetic construct
  modified_base 16: mod_base = OTHER; note = thymine
  misc_feature 1..16: note = Antisense oligonucleotide
  modified_base 1: mod_base = OTHER; note = misc_feature - bicyclic nucleic acid scaffold modification
  modified_base 2: mod_base = OTHER; note = misc_feature - n is inosine, often denoted as i
  modified_base 16: mod_base = OTHER; note = misc_feature - bicyclic nucleic acid scaffold modification
  source 1..16: mol_type = other RNA
cnctgcccaatgccat

SEQ ID NO: 4145 - RNA, 16 nt, synthetic construct
  modified_base 16: mod_base = OTHER; note = thymine
  misc_feature 1..16: note = Antisense oligonucleotide
  modified_base 1: mod_base = OTHER; note = misc_feature - bicyclic nucleic acid scaffold modification
  modified_base 2: mod_base = OTHER; note = misc_feature - n is inosine, often denoted as i
  modified_base 12: mod_base = OTHER; note = misc_feature - bicyclic nucleic acid scaffold modification
  modified_base 16: mod_base = OTHER; note = misc_feature - bicyclic nucleic acid scaffold modification
  source 1..16: mol_type = other RNA
cnctgcccaatgccat

SEQ ID NO: 4146 - RNA, 16 nt, synthetic construct
  modified_base 16: mod_base = OTHER; note = thymine
  misc_feature 1..16: note = Antisense oligonucleotide
  modified_base 1: mod_base = OTHER; note = misc_feature - bicyclic nucleic acid scaffold modification
  modified_base 2: mod_base = OTHER; note = misc_feature - n is inosine, often denoted as i
  modified_base 5: mod_base = OTHER; note = misc_feature - bicyclic nucleic acid scaffold modification
  modified_base 16: mod_base = OTHER; note = misc_feature - bicyclic nucleic acid scaffold modification
  source 1..16: mol_type = other RNA
cnctgcccaatgccat

SEQ ID NO: 4147 - RNA, 16 nt, synthetic construct
  modified_base 16: mod_base = OTHER; note = thymine
  misc_feature 1..16: note = Antisense oligonucleotide
  modified_base 1: mod_base = OTHER; note = misc_feature - bicyclic nucleic acid scaffold modification
  modified_base 2: mod_base = OTHER; note = misc_feature - n is inosine, often denoted as i
  modified_base 5: mod_base = OTHER; note = misc_feature - bicyclic nucleic acid scaffold modification
  modified_base 12: mod_base = OTHER; note = misc_feature - bicyclic nucleic acid scaffold modification
  modified_base 16: mod_base = OTHER; note = misc_feature - bicyclic nucleic acid scaffold modification
  source 1..16: mol_type = other RNA
cnctgcccaatgccat

SEQ ID NO: 4148 - RNA, 16 nt, synthetic construct
  modified_base 16: mod_base = OTHER; note = thymine
  misc_feature 1..16: note = Antisense oligonucleotide
  modified_base 1: mod_base = OTHER; note = misc_feature - bicyclic nucleic acid scaffold modification
  modified_base 2: mod_base = OTHER; note = misc_feature - n is inosine, often denoted as i
  modified_base 16: mod_base = OTHER; note = misc_feature - bicyclic nucleic acid scaffold modification
  source 1..16: mol_type = other RNA
cnctgcccaatgccat

SEQ ID NO: 4149 - RNA, 16 nt, synthetic construct
  modified_base 16: mod_base = OTHER; note = thymine
  misc_feature 1..16: note = Antisense oligonucleotide
  modified_base 1: mod_base = OTHER; note = misc_feature - bicyclic nucleic acid scaffold modification
  modified_base 2: mod_base = OTHER; note = misc_feature - n is inosine, often denoted as i
  modified_base 8: mod_base = OTHER; note = misc_feature - bicyclic nucleic acid scaffold modification
  modified_base 16: mod_base = OTHER; note = misc_feature - bicyclic nucleic acid scaffold modification
  source 1..16: mol_type = other RNA
cnctgcccaatgccat

SEQ ID NO: 4150 - RNA, 16 nt, synthetic construct
  modified_base 16: mod_base = OTHER; note = thymine
  misc_feature 1..16: note = Antisense oligonucleotide
  modified_base 1: mod_base = OTHER; note = misc_feature - bicyclic nucleic acid scaffold modification
  modified_base 2: mod_base = OTHER; note = misc_feature - n is inosine, often denoted as i
  modified_base 3: mod_base = OTHER; note = misc_feature - bicyclic nucleic acid scaffold modification
  modified_base 16: mod_base = OTHER; note = misc_feature - bicyclic nucleic acid scaffold modification
  source 1..16: mol_type = other RNA
cnctgcccaatgccat

SEQ ID NO: 4151 - RNA, 16 nt, synthetic construct
  modified_base 16: mod_base = OTHER; note = thymine
  misc_feature 1..16: note = Antisense oligonucleotide
  modified_base 1: mod_base = OTHER; note = misc_feature - bicyclic nucleic acid scaffold modification
  modified_base 2: mod_base = OTHER; note = misc_feature - n is inosine, often denoted as i
  modified_base 3: mod_base = OTHER; note = misc_feature - bicyclic nucleic acid scaffold modification
  modified_base 8: mod_base = OTHER; note = misc_feature - bicyclic nucleic acid scaffold modification
  modified_base 16: mod_base = OTHER; note = misc_feature - bicyclic nucleic acid scaffold modification
  source 1..16: mol_type = other RNA
cnctgcccaatgccat

SEQ ID NO: 4152 - RNA, 16 nt, synthetic construct
  modified_base 16: mod_base = OTHER; note = thymine
  misc_feature 1..16: note = Antisense oligonucleotide
  modified_base 1: mod_base = OTHER; note = misc_feature - bicyclic nucleic acid scaffold modification
  modified_base 2: mod_base = OTHER; note = misc_feature - n is inosine, often denoted as i
  modified_base 8: mod_base = OTHER; note = misc_feature - bicyclic nucleic acid scaffold modification
  modified_base 14: mod_base = OTHER; note = misc_feature - bicyclic nucleic acid scaffold modification
  modified_base 16: mod_base = OTHER; note = misc_feature - bicyclic nucleic acid scaffold modification
  source 1..16: mol_type = other RNA
cnctgcccaatgccat

SEQ ID NO: 4153 - RNA, 16 nt, synthetic construct
  modified_base 16: mod_base = OTHER; note = thymine
  misc_feature 1..16: note = Antisense oligonucleotide
  modified_base 1: mod_base = OTHER; note = misc_feature - bicyclic nucleic acid scaffold modification
  modified_base 2: mod_base = OTHER; note = misc_feature - n is inosine, often denoted as i
  modified_base 3: mod_base = OTHER; note = misc_feature - bicyclic nucleic acid scaffold modification
  modified_base 12: mod_base = OTHER; note = misc_feature - bicyclic nucleic acid scaffold modification
  modified_base 15..16: mod_base = OTHER; note = misc_feature - bicyclic nucleic acid scaffold modification
  source 1..16: mol_type = other RNA
cnctgcccaatgccat

SEQ ID NO: 4154 - RNA, 16 nt, synthetic construct
  modified_base 16: mod_base = OTHER; note = thymine
  misc_feature 1..16: note = Antisense oligonucleotide
  modified_base 1: mod_base = OTHER; note = misc_feature - bicyclic nucleic acid scaffold modification
  modified_base 2: mod_base = OTHER; note = misc_feature - n is inosine, often denoted as i
  modified_base 3: mod_base = OTHER; note = misc_feature - bicyclic nucleic acid scaffold modification
  modified_base 5: mod_base = OTHER; note = misc_feature - bicyclic nucleic acid scaffold modification
  modified_base 12: mod_base = OTHER; note = misc_feature - bicyclic nucleic acid scaffold modification
  modified_base 15..16: mod_base = OTHER; note = misc_feature - bicyclic nucleic acid scaffold modification
  source 1..16: mol_type = other RNA
cnctgcccaatgccat

SEQ ID NO: 4155 - RNA, 16 nt, synthetic construct
  misc_feature 1..16: note = Antisense oligonucleotide
  modified_base 1: mod_base = OTHER; note = misc_feature - n is inosine, often denoted as i
  modified_base 2: mod_base = OTHER; note = misc_feature - bicyclic nucleic acid scaffold modification
  modified_base 16: mod_base = OTHER; note = misc_feature - bicyclic nucleic acid scaffold modification
  source 1..16: mol_type = other RNA
nctgcccaatgccatc

SEQ ID NO: 4156 - RNA, 16 nt, synthetic construct
  misc_feature 1..16: note = Antisense oligonucleotide
  modified_base 1: mod_base = OTHER; note = misc_feature - n is inosine, often denoted as i
  modified_base 2: mod_base = OTHER; note = misc_feature - bicyclic nucleic acid scaffold modification
  modified_base 11: mod_base = OTHER; note = misc_feature - bicyclic nucleic acid scaffold modification
  modified_base 16: mod_base = OTHER; note = misc_feature - bicyclic nucleic acid scaffold modification
  source 1..16: mol_type = other RNA
nctgcccaatgccatc

SEQ ID NO: 4157 - RNA, 16 nt, synthetic construct
  misc_feature 1..16: note = Antisense oligonucleotide
  modified_base 1: mod_base = OTHER; note = misc_feature - n is inosine, often denoted as i
  modified_base 2: mod_base = OTHER; note = misc_feature - bicyclic nucleic acid scaffold modification
  modified_base 4: mod_base = OTHER; note = misc_feature - bicyclic nucleic acid scaffold modification
  modified_base 16: mod_base = OTHER; note = misc_feature - bicyclic nucleic acid scaffold modification
  source 1..16: mol_type = other RNA
nctgcccaatgccatc

SEQ ID NO: 4158 - RNA, 16 nt, synthetic construct
  misc_feature 1..16: note = Antisense oligonucleotide
  modified_base 1: mod_base = OTHER; note = misc_feature - n is inosine, often denoted as i
  modified_base 2: mod_base = OTHER; note = misc_feature - bicyclic nucleic acid scaffold modification
  modified_base 4: mod_base = OTHER; note = misc_feature - bicyclic nucleic acid scaffold modification
  modified_base 11: mod_base = OTHER; note = misc_feature - bicyclic nucleic acid scaffold modification
  modified_base 16: mod_base = OTHER; note = misc_feature - bicyclic nucleic acid scaffold modification
  source 1..16: mol_type = other RNA
nctgcccaatgccatc

SEQ ID NO: 4159 - RNA, 16 nt, synthetic construct
  misc_feature 1..16: note = Antisense oligonucleotide
  modified_base 1: mod_base = OTHER; note = misc_feature - n is inosine, often denoted as i
  modified_base 2: mod_base = OTHER; note = misc_feature - bicyclic nucleic acid scaffold modification
  modified_base 13: mod_base = OTHER; note = misc_feature - bicyclic nucleic acid scaffold modification
  modified_base 16: mod_base = OTHER; note = misc_feature - bicyclic nucleic acid scaffold modification
  source 1..16: mol_type = other RNA
nctgcccaatgccatc

SEQ ID NO: 4160 - RNA, 16 nt, synthetic construct
  misc_feature 1..16: note = Antisense oligonucleotide
  modified_base 1: mod_base = OTHER; note = misc_feature - n is inosine, often denoted as i
  modified_base 2: mod_base = OTHER; note = misc_feature - bicyclic nucleic acid scaffold modification
  modified_base 7: mod_base = OTHER; note = misc_feature - bicyclic nucleic acid scaffold modification
  modified_base 16: mod_base = OTHER; note = misc_feature - bicyclic nucleic acid scaffold modification
  source 1..16: mol_type = other RNA
nctgcccaatgccatc

SEQ ID NO: 4161 - RNA, 16 nt, synthetic construct
  misc_feature 1..16: note = Antisense oligonucleotide
  modified_base 1: mod_base = OTHER; note = misc_feature - n is inosine, often denoted as i
  modified_base 2: mod_base = OTHER; note = misc_feature - bicyclic nucleic acid scaffold modification
  modified_base 7: mod_base = OTHER; note = misc_feature - bicyclic nucleic acid scaffold modification
  modified_base 13: mod_base = OTHER; note = misc_feature - bicyclic nucleic acid scaffold modification
  modified_base 16: mod_base = OTHER; note = misc_feature - bicyclic nucleic acid scaffold modification
  source 1..16: mol_type = other RNA
nctgcccaatgccatc

SEQ ID NO: 4162 - RNA, 16 nt, synthetic construct
  misc_feature 1..16: note = Antisense oligonucleotide
  modified_base 1: mod_base = OTHER; note = misc_feature - n is inosine, often denoted as i
  modified_base 2: mod_base = OTHER; note = misc_feature - bicyclic nucleic acid scaffold modification
  modified_base 6: mod_base = OTHER; note = misc_feature - bicyclic nucleic acid scaffold modification
  modified_base 12: mod_base = OTHER; note = misc_feature - bicyclic nucleic acid scaffold modification
  modified_base 16: mod_base = OTHER; note = misc_feature - bicyclic nucleic acid scaffold modification
  source 1..16: mol_type = other RNA
nctgcccaatgccatc

SEQ ID NO: 4163 - RNA, 16 nt, synthetic construct
  modified_base 15: mod_base = OTHER; note = thymine
  misc_feature 1..16: note = Antisense oligonucleotide
  modified_base 1: mod_base = OTHER; note = misc_feature - n is inosine, often denoted as i
  modified_base 2: mod_base = OTHER; note = misc_feature - bicyclic nucleic acid scaffold modification
  modified_base 15..16: mod_base = OTHER; note = misc_feature - bicyclic nucleic acid scaffold modification
  source 1..16: mol_type = other RNA
nctgcccaatgccatc

SEQ ID NO: 4164 - RNA, 16 nt, synthetic construct
  modified_base 15: mod_base = OTHER; note = thymine
  misc_feature 1..16: note = Antisense oligonucleotide
  modified_base 1: mod_base = OTHER; note = misc_feature - n is inosine, often denoted as i
  modified_base 2: mod_base = OTHER; note = misc_feature - bicyclic nucleic acid scaffold modification
  modified_base 11: mod_base = OTHER; note = misc_feature - bicyclic nucleic acid scaffold modification
  modified_base 15..16: mod_base = OTHER; note = misc_feature - bicyclic nucleic acid scaffold modification
  source 1..16: mol_type = other RNA
nctgcccaatgccatc

SEQ ID NO: 4165 - RNA, 16 nt, synthetic construct
  modified_base 15: mod_base = OTHER; note = thymine
  misc_feature 1..16: note = Antisense oligonucleotide
  modified_base 1: mod_base = OTHER; note = misc_feature - n is inosine, often denoted as i
  modified_base 2: mod_base = OTHER; note = misc_feature - bicyclic nucleic acid scaffold modification
  modified_base 4: mod_base = OTHER; note = misc_feature - bicyclic nucleic acid scaffold modification
  modified_base 7: mod_base = OTHER; note = misc_feature - bicyclic nucleic acid scaffold modification
  modified_base 15..16: mod_base = OTHER; note = misc_feature - bicyclic nucleic acid scaffold modification
  source 1..16: mol_type = other RNA
nctgcccaatgccatc

SEQ ID NO: 4166 - RNA, 16 nt, synthetic construct
  misc_feature 1..16: note = Antisense oligonucleotide
  modified_base 1: mod_base = OTHER; note = misc_feature - bicyclic nucleic acid scaffold modification
  modified_base 16: mod_base = OTHER; note = misc_feature - bicyclic nucleic acid scaffold modification
  source 1..16: mol_type = other RNA
ctgcccaatgccatcc

SEQ ID NO: 4167 - RNA, 16 nt, synthetic construct
  misc_feature 1..16: note = Antisense oligonucleotide
  modified_base 1: mod_base = OTHER; note = misc_feature - bicyclic nucleic acid scaffold modification
  modified_base 3: mod_base = OTHER; note = misc_feature - bicyclic nucleic acid scaffold modification
  modified_base 16: mod_base = OTHER; note = misc_feature - bicyclic nucleic acid scaffold modification
  source 1..16: mol_type = other RNA
ctgcccaatgccatcc

SEQ ID NO: 4168 - RNA, 16 nt, synthetic construct
  misc_feature 1..16: note = Antisense oligonucleotide
  modified_base 1: mod_base = OTHER; note = misc_feature - bicyclic nucleic acid scaffold modification
  modified_base 10: mod_base = OTHER; note = misc_feature - bicyclic nucleic acid scaffold modification
  modified_base 16: mod_base = OTHER; note = misc_feature - bicyclic nucleic acid scaffold modification
  source 1..16: mol_type = other RNA
ctgcccaatgccatcc

SEQ ID NO: 4169 - RNA, 16 nt, synthetic construct
  misc_feature 1..16: note = Antisense oligonucleotide
  modified_base 1: mod_base = OTHER; note = misc_feature - bicyclic nucleic acid scaffold modification
  modified_base 3: mod_base = OTHER; note = misc_feature - bicyclic nucleic acid scaffold modification
  modified_base 10: mod_base = OTHER; note = misc_feature - bicyclic nucleic acid scaffold modification
  modified_base 16: mod_base = OTHER; note = misc_feature - bicyclic nucleic acid scaffold modification
  source 1..16: mol_type = other RNA
ctgcccaatgccatcc

SEQ ID NO: 4170 - RNA, 16 nt, synthetic construct
  misc_feature 1..16: note = Antisense oligonucleotide
  modified_base 1: mod_base = OTHER; note = misc_feature - bicyclic nucleic acid scaffold modification
  modified_base 12: mod_base = OTHER; note = misc_feature - bicyclic nucleic acid scaffold modification
  modified_base 16: mod_base = OTHER; note = misc_feature - bicyclic nucleic acid scaffold modification
  source 1..16: mol_type = other RNA
ctgcccaatgccatcc

SEQ ID NO: 4171 - RNA, 16 nt, synthetic construct
  misc_feature 1..16: note = Antisense oligonucleotide
  modified_base 1: mod_base = OTHER; note = misc_feature - bicyclic nucleic acid scaffold modification
  modified_base 6: mod_base = OTHER; note = misc_feature - bicyclic nucleic acid scaffold modification
  modified_base 16: mod_base = OTHER; note = misc_feature - bicyclic nucleic acid scaffold modification
  source 1..16: mol_type = other RNA
ctgcccaatgccatcc

SEQ ID NO: 4172 - RNA, 16 nt, synthetic construct
  misc_feature 1..16: note = Antisense oligonucleotide
  modified_base 1: mod_base = OTHER; note = misc_feature - bicyclic nucleic acid scaffold modification
  modified_base 6: mod_base = OTHER; note = misc_feature - bicyclic nucleic acid scaffold modification
  modified_base 12: mod_base = OTHER; note = misc_feature - bicyclic nucleic acid scaffold modification
  modified_base 16: mod_base = OTHER; note = misc_feature - bicyclic nucleic acid scaffold modification
  source 1..16: mol_type = other RNA
ctgcccaatgccatcc

SEQ ID NO: 4173 - RNA, 16 nt, synthetic construct
  misc_feature 1..16: note = Antisense oligonucleotide
  modified_base 1: mod_base = OTHER; note = misc_feature - bicyclic nucleic acid scaffold modification
  modified_base 3: mod_base = OTHER; note = misc_feature - bicyclic nucleic acid scaffold modification
  modified_base 6: mod_base = OTHER; note = misc_feature - bicyclic nucleic acid scaffold modification
  modified_base 10: mod_base = OTHER; note = misc_feature - bicyclic nucleic acid scaffold modification
  modified_base 16: mod_base = OTHER; note = misc_feature - bicyclic nucleic acid scaffold modification
  source 1..16: mol_type = other RNA
ctgcccaatgccatcc

SEQ ID NO: 4174 - RNA, 16 nt, synthetic construct
  misc_feature 1..16: note = Antisense oligonucleotide
  modified_base 1: mod_base = OTHER; note = misc_feature - bicyclic nucleic acid scaffold modification
  modified_base 6: mod_base = OTHER; note = misc_feature - bicyclic nucleic acid scaffold modification
  modified_base 10: mod_base = OTHER; note = misc_feature - bicyclic nucleic acid scaffold modification
  modified_base 15..16: mod_base = OTHER; note = misc_feature - bicyclic nucleic acid scaffold modification
  source 1..16: mol_type = other RNA
ctgcccaatgccatcc

SEQ ID NO: 4175 - RNA, 16 nt, synthetic construct
  modified_base 2: mod_base = OTHER; note = thymine
  misc_feature 1..16: note = Antisense oligonucleotide
  modified_base 1..2: mod_base = OTHER; note = misc_feature - bicyclic nucleic acid scaffold modification
  modified_base 15..16: mod_base = OTHER; note = misc_feature - bicyclic nucleic acid scaffold modification
  source 1..16: mol_type = other RNA
ctgcccaatgccatcc

SEQ ID NO: 4176 - RNA, 16 nt, synthetic construct
  modified_base 2: mod_base = OTHER; note = thymine
  misc_feature 1..16: note = Antisense oligonucleotide
  modified_base 1..2: mod_base = OTHER; note = misc_feature - bicyclic nucleic acid scaffold modification
  modified_base 6: mod_base = OTHER; note = misc_feature - bicyclic nucleic acid scaffold modification
  modified_base 10: mod_base = OTHER; note = misc_feature - bicyclic nucleic acid scaffold modification
  modified_base 15..16: mod_base = OTHER; note = misc_feature - bicyclic nucleic acid scaffold modification
  source 1..16: mol_type = other RNA
ctgcccaatgccatcc

SEQ ID NO: 4177 - RNA, 16 nt, synthetic construct
  modified_base 1: mod_base = OTHER; note = thymine
  modified_base 16: mod_base = OTHER; note = thymine
  misc_feature 1..16: note = Antisense oligonucleotide
  modified_base 1: mod_base = OTHER; note = misc_feature - bicyclic nucleic acid scaffold modification
  modified_base 16: mod_base = OTHER; note = misc_feature - bicyclic nucleic acid scaffold modification
  source 1..16: mol_type = other RNA
tgcccaatgccatcct

SEQ ID NO: 4178 - RNA, 16 nt, synthetic construct
  modified_base 1: mod_base = OTHER; note = thymine
  modified_base 16: mod_base = OTHER; note = thymine
  misc_feature 1..16: note = Antisense oligonucleotide
  modified_base 1: mod_base = OTHER; note = misc_feature - bicyclic nucleic acid scaffold modification
  modified_base 9: mod_base = OTHER; note = misc_feature - bicyclic nucleic acid scaffold modification
  modified_base 16: mod_base = OTHER; note = misc_feature - bicyclic nucleic acid scaffold modification
  source 1..16: mol_type = other RNA
tgcccaatgccatcct

SEQ ID NO: 4179 - RNA, 16 nt, synthetic construct
  modified_base 1: mod_base = OTHER; note = thymine
  modified_base 16: mod_base = OTHER; note = thymine
  misc_feature 1..16: note = Antisense oligonucleotide
  modified_base 1: mod_base = OTHER; note = misc_feature - bicyclic nucleic acid scaffold modification
  modified_base 11: mod_base = OTHER; note = misc_feature - bicyclic nucleic acid scaffold modification
  modified_base 16: mod_base = OTHER; note = misc_feature - bicyclic nucleic acid scaffold modification
  source 1..16: mol_type = other RNA
tgcccaatgccatcct

SEQ ID NO: 4180 - RNA, 16 nt, synthetic construct
  modified_base 1: mod_base = OTHER; note = thymine
  modified_base 16: mod_base = OTHER; note = thymine
  misc_feature 1..16: note = Antisense oligonucleotide
  modified_base 1: mod_base = OTHER; note = misc_feature - bicyclic nucleic acid scaffold modification
  modified_base 5: mod_base = OTHER; note = misc_feature - bicyclic nucleic acid scaffold modification
  modified_base 16: mod_base = OTHER; note = misc_feature - bicyclic nucleic acid scaffold modification
  source 1..16: mol_type = other RNA
tgcccaatgccatcct

SEQ ID NO: 4181 - RNA, 16 nt, synthetic construct
  modified_base 1: mod_base = OTHER; note = thymine
  modified_base 16: mod_base = OTHER; note = thymine
  misc_feature 1..16: note = Antisense oligonucleotide
  modified_base 1: mod_base = OTHER; note = misc_feature - bicyclic nucleic acid scaffold modification
  modified_base 5: mod_base = OTHER; note = misc_feature - bicyclic nucleic acid scaffold modification
  modified_base 11: mod_base = OTHER; note = misc_feature - bicyclic nucleic acid scaffold modification
  modified_base 16: mod_base = OTHER; note = misc_feature - bicyclic nucleic acid scaffold modification
  source 1..16: mol_type = other RNA
tgcccaatgccatcct

SEQ ID NO: 4182 - RNA, 16 nt, synthetic construct
  modified_base 1: mod_base = OTHER; note = thymine
  modified_base 16: mod_base = OTHER; note = thymine
  misc_feature 1..16: note = Antisense oligonucleotide
  modified_base 1: mod_base = OTHER; note = misc_feature - bicyclic nucleic acid scaffold modification
  modified_base 3: mod_base = OTHER; note = misc_feature - bicyclic nucleic acid scaffold modification
  modified_base 14: mod_base = OTHER; note = misc_feature - bicyclic nucleic acid scaffold modification
  modified_base 16: mod_base = OTHER; note = misc_feature - bicyclic nucleic acid scaffold modification
  source 1..16: mol_type = other RNA
tgcccaatgccatcct

SEQ ID NO: 4183 - RNA, 16 nt, synthetic construct
  modified_base 1: mod_base = OTHER; note = thymine
  modified_base 16: mod_base = OTHER; note = thymine
  misc_feature 1..16: note = Antisense oligonucleotide
  modified_base 1: mod_base = OTHER; note = misc_feature - bicyclic nucleic acid scaffold modification
  modified_base 5: mod_base = OTHER; note = misc_feature - bicyclic nucleic acid scaffold modification
  modified_base 11: mod_base = OTHER; note = misc_feature - bicyclic nucleic acid scaffold modification
  modified_base 15..16: mod_base = OTHER; note = misc_feature - bicyclic nucleic acid scaffold modification
  source 1..16: mol_type = other RNA
tgcccaatgccatcct

SEQ ID NO: 4184 - RNA, 16 nt, synthetic construct
  modified_base 1: mod_base = OTHER; note = thymine
  modified_base 16: mod_base = OTHER; note = thymine
  misc_feature 1..16: note = Antisense oligonucleotide
  modified_base 1..2: mod_base = OTHER; note = misc_feature - bicyclic nucleic acid scaffold modification
  modified_base 15..16: mod_base = OTHER; note = misc_feature - bicyclic nucleic acid scaffold modification
  source 1..16: mol_type = other RNA
tgcccaatgccatcct

SEQ ID NO: 4185 - RNA, 16 nt, synthetic construct
  modified_base 1: mod_base = OTHER; note = thymine
  modified_base 16: mod_base = OTHER; note = thymine
  misc_feature 1..16: note = Antisense oligonucleotide
  modified_base 1..2: mod_base = OTHER; note = misc_feature - bicyclic nucleic acid scaffold modification
  modified_base 9: mod_base = OTHER; note = misc_feature - bicyclic nucleic acid scaffold modification
  modified_base 15..16: mod_base = OTHER; note = misc_feature - bicyclic nucleic acid scaffold modification
  source 1..16: mol_type = other RNA
tgcccaatgccatcct

SEQ ID NO: 4186 - RNA, 16 nt, synthetic construct
  modified_base 1: mod_base = OTHER; note = thymine
  modified_base 16: mod_base = OTHER; note = thymine
  misc_feature 1..16: note = Antisense oligonucleotide
  modified_base 1..2: mod_base = OTHER; note = misc_feature - bicyclic nucleic acid scaffold modification
  modified_base 5: mod_base = OTHER; note = misc_feature - bicyclic nucleic acid scaffold modification
  modified_base 11: mod_base = OTHER; note = misc_feature - bicyclic nucleic acid scaffold modification
  modified_base 15..16: mod_base = OTHER; note = misc_feature - bicyclic nucleic acid scaffold modification
  source 1..16: mol_type = other RNA
tgcccaatgccatcct

SEQ ID NO: 4187 - RNA, 16 nt, synthetic construct
  modified_base 1: mod_base = OTHER; note = thymine
  modified_base 16: mod_base = OTHER; note = thymine
  misc_feature 1..16: note = Antisense oligonucleotide
  modified_base 1..2: mod_base = OTHER; note = misc_feature - bicyclic nucleic acid scaffold modification
  modified_base 9..10: mod_base = OTHER; note = misc_feature - bicyclic nucleic acid scaffold modification
  modified_base 15..16: mod_base = OTHER; note = misc_feature - bicyclic nucleic acid scaffold modification
  source 1..16: mol_type = other RNA
tgcccaatgccatcct

SEQ ID NO: 4188 - RNA, 16 nt, synthetic construct
  misc_feature 1..16: note = Antisense oligonucleotide
  modified_base 1: mod_base = OTHER; note = misc_feature - bicyclic nucleic acid scaffold modification
  modified_base 16: mod_base = OTHER; note = misc_feature - bicyclic nucleic acid scaffold modification
  source 1..16: mol_type = other RNA
gcccaatgccatcctg

SEQ ID NO: 4189 - RNA, 16 nt, synthetic construct
  misc_feature 1..16: note = Antisense oligonucleotide
  modified_base 1: mod_base = OTHER; note = misc_feature - bicyclic nucleic acid scaffold modification
  modified_base 8: mod_base = OTHER; note = misc_feature - bicyclic nucleic acid scaffold modification
  modified_base 16: mod_base = OTHER; note = misc_feature - bicyclic nucleic acid scaffold modification
  source 1..16: mol_type = other RNA
gcccaatgccatcctg

SEQ ID NO: 4190 - RNA, 16 nt, synthetic construct
  misc_feature 1..16: note = Antisense oligonucleotide
  modified_base 1: mod_base = OTHER; note = misc_feature - bicyclic nucleic acid scaffold modification
  modified_base 14: mod_base = OTHER; note = misc_feature - bicyclic nucleic acid scaffold modification
  modified_base 16: mod_base = OTHER; note = misc_feature - bicyclic nucleic acid scaffold modification
  source 1..16: mol_type = other RNA
gcccaatgccatcctg

SEQ ID NO: 4191 - RNA, 16 nt, synthetic construct
  misc_feature 1..16: note = Antisense oligonucleotide
  modified_base 1: mod_base = OTHER; note = misc_feature - bicyclic nucleic acid scaffold modification
  modified_base 10: mod_base = OTHER; note = misc_feature - bicyclic nucleic acid scaffold modification
  modified_base 14: mod_base = OTHER; note = misc_feature - bicyclic nucleic acid scaffold modification
  modified_base 16: mod_base = OTHER; note = misc_feature - bicyclic nucleic acid scaffold modification
  source 1..16: mol_type = other RNA
gcccaatgccatcctg

SEQ ID NO: 4192 - RNA, 16 nt, synthetic construct
  misc_feature 1..16: note = Antisense oligonucleotide
  modified_base 1: mod_base = OTHER; note = misc_feature - bicyclic nucleic acid scaffold modification
  modified_base 10: mod_base = OTHER; note = misc_feature - bicyclic nucleic acid scaffold modification
  modified_base 16: mod_base = OTHER; note = misc_feature - bicyclic nucleic acid scaffold modification
  source 1..16: mol_type = other RNA
gcccaatgccatcctg

SEQ ID NO: 4193 - RNA, 16 nt, synthetic construct
  misc_feature 1..16: note = Antisense oligonucleotide
  modified_base 1: mod_base = OTHER; note = misc_feature - bicyclic nucleic acid scaffold modification
  modified_base 4: mod_base = OTHER; note = misc_feature - bicyclic nucleic acid scaffold modification
  modified_base 10: mod_base = OTHER; note = misc_feature - bicyclic nucleic acid scaffold modification
  modified_base 16: mod_base = OTHER; note = misc_feature - bicyclic nucleic acid scaffold modification
  source 1..16: mol_type = other RNA
gcccaatgccatcctg

SEQ ID NO: 4194 - RNA, 16 nt, synthetic construct
  misc_feature 1..16: note = Antisense oligonucleotide
  modified_base 1: mod_base = OTHER; note = misc_feature - bicyclic nucleic acid scaffold modification
  modified_base 4: mod_base = OTHER; note = misc_feature - bicyclic nucleic acid scaffold modification
  modified_base 8: mod_base = OTHER; note = misc_feature - bicyclic nucleic acid scaffold modification
  modified_base 13: mod_base = OTHER; note = misc_feature - bicyclic nucleic acid scaffold modification
  modified_base 16: mod_base = OTHER; note = misc_feature - bicyclic nucleic acid scaffold modification
  source 1..16: mol_type = other RNA
gcccaatgccatcctg

SEQ ID NO: 4195 - RNA, 16 nt, synthetic construct
  modified_base 15: mod_base = OTHER; note = thymine
  misc_feature 1..16: note = Antisense oligonucleotide
  modified_base 1..2: mod_base = OTHER; note = misc_feature - bicyclic nucleic acid scaffold modification
  modified_base 15..16: mod_base = OTHER; note = misc_feature - bicyclic nucleic acid scaffold modification
  source 1..16: mol_type = other RNA
gcccaatgccatcctg

SEQ ID NO: 4196 - RNA, 16 nt, synthetic construct
  modified_base 15: mod_base = OTHER; note = thymine
  misc_feature 1..16: note = Antisense oligonucleotide
  modified_base 1..2: mod_base = OTHER; note = misc_feature - bicyclic nucleic acid scaffold modification
  modified_base 8: mod_base = OTHER; note = misc_feature - bicyclic nucleic acid scaffold modification
  modified_base 15..16: mod_base = OTHER; note = misc_feature - bicyclic nucleic acid scaffold modification
  source 1..16: mol_type = other RNA
gcccaatgccatcctg

SEQ ID NO: 4197 - RNA, 16 nt, synthetic construct
  modified_base 15: mod_base = OTHER; note = thymine
  misc_feature 1..16: note = Antisense oligonucleotide
  modified_base 1..2: mod_base = OTHER; note = misc_feature - bicyclic nucleic acid scaffold modification
  modified_base 4: mod_base = OTHER; note = misc_feature - bicyclic nucleic acid scaffold modification
  modified_base 10: mod_base = OTHER; note = misc_feature - bicyclic nucleic acid scaffold modification
  modified_base 15..16: mod_base = OTHER; note = misc_feature - bicyclic nucleic acid scaffold modification
  source 1..16: mol_type = other RNA
gcccaatgccatcctg

SEQ ID NO: 4198 - RNA, 22 nt, synthetic construct
  misc_feature 1..22: note = Antisense oligonucleotide
  modified_base 1: mod_base = OTHER; note = misc_feature - bicyclic nucleic acid scaffold modification
  modified_base 22: mod_base = OTHER; note = misc_feature - bicyclic nucleic acid scaffold modification
  source 1..22: mol_type = other RNA
caatgttctgacaacagtttgc

SEQ ID NO: 4199 - RNA, 22 nt, synthetic construct
  misc_feature 1..22: note = Antisense oligonucleotide
  modified_base 1: mod_base = OTHER; note = misc_feature - bicyclic nucleic acid scaffold modification
  modified_base 5: mod_base = OTHER; note = misc_feature - bicyclic nucleic acid scaffold modification
  modified_base 22: mod_base = OTHER; note = misc_feature - bicyclic nucleic acid scaffold modification
  source 1..22: mol_type = other RNA
caatgttctgacaacagtttgc

SEQ ID NO: 4200 - RNA, 22 nt, synthetic construct
  misc_feature 1..22: note = Antisense oligonucleotide
  modified_base 1: mod_base = OTHER; note = misc_feature - bicyclic nucleic acid scaffold modification
  modified_base 10: mod_base = OTHER; note = misc_feature - bicyclic nucleic acid scaffold modification
  modified_base 22: mod_base = OTHER; note = misc_feature - bicyclic nucleic acid scaffold modification
  source 1..22: mol_type = other RNA
caatgttctgacaacagtttgc

SEQ ID NO: 4201 - RNA, 22 nt, synthetic construct
  misc_feature 1..22: note = Antisense oligonucleotide
  modified_base 1: mod_base = OTHER; note = misc_feature - bicyclic nucleic acid scaffold modification
  modified_base 17: mod_base = OTHER; note = misc_feature - bicyclic nucleic acid scaffold modification
  modified_base 22: mod_base = OTHER; note = misc_feature - bicyclic nucleic acid scaffold modification
  source 1..22: mol_type = other RNA
caatgttctgacaacagtttgc

SEQ ID NO: 4202 - RNA, 22 nt, synthetic construct
  misc_feature 1..22: note = Antisense oligonucleotide
  modified_base 1: mod_base = OTHER; note = misc_feature - bicyclic nucleic acid scaffold modification
  modified_base 10: mod_base = OTHER; note = misc_feature - bicyclic nucleic acid scaffold modification
  modified_base 17: mod_base = OTHER; note = misc_feature - bicyclic nucleic acid scaffold modification
  modified_base 22: mod_base = OTHER; note = misc_feature - bicyclic nucleic acid scaffold modification
  source 1..22: mol_type = other RNA
caatgttctgacaacagtttgc

SEQ ID NO: 4203 - RNA, 22 nt, synthetic construct
  misc_feature 1..22: note = Antisense oligonucleotide
  modified_base 1: mod_base = OTHER; note = misc_feature - bicyclic nucleic acid scaffold modification
  modified_base 5: mod_base = OTHER; note = misc_feature - bicyclic nucleic acid scaffold modification
  modified_base 10: mod_base = OTHER; note = misc_feature - bicyclic nucleic acid scaffold modification
  modified_base 22: mod_base = OTHER; note = misc_feature - bicyclic nucleic acid scaffold modification
  source 1..22: mol_type = other RNA
caatgttctgacaacagtttgc

SEQ ID NO: 4204 - RNA, 22 nt, synthetic construct
  misc_feature 1..22: note = Antisense oligonucleotide
  modified_base 1: mod_base = OTHER; note = misc_feature - bicyclic nucleic acid scaffold modification
  modified_base 5: mod_base = OTHER; note = misc_feature - bicyclic nucleic acid scaffold modification
  modified_base 17: mod_base = OTHER; note = misc_feature - bicyclic nucleic acid scaffold modification
  modified_base 22: mod_base = OTHER; note = misc_feature - bicyclic nucleic acid scaffold modification
  source 1..22: mol_type = other RNA
caatgttctgacaacagtttgc

SEQ ID NO: 4205 - RNA, 22 nt, synthetic construct
  misc_feature 1..22: note = Antisense oligonucleotide
  modified_base 1: mod_base = OTHER; note = misc_feature - bicyclic nucleic acid scaffold modification
  modified_base 15: mod_base = OTHER; note = misc_feature - bicyclic nucleic acid scaffold modification
  modified_base 22: mod_base = OTHER; note = misc_feature - bicyclic nucleic acid scaffold modification
  source 1..22: mol_type = other RNA
caatgttctgacaacagtttgc

SEQ ID NO: 4206 - RNA, 22 nt, synthetic construct
  misc_feature 1..22: note = Antisense oligonucleotide
  modified_base 1: mod_base = OTHER; note = misc_feature - bicyclic nucleic acid scaffold modification
  modified_base 12: mod_base = OTHER; note = misc_feature - bicyclic nucleic acid scaffold modification
  modified_base 22: mod_base = OTHER; note = misc_feature - bicyclic nucleic acid scaffold modification
  source 1..22: mol_type = other RNA
caatgttctgacaacagtttgc

SEQ ID NO: 4207 - RNA, 22 nt, synthetic construct
  misc_feature 1..22: note = Antisense oligonucleotide
  modified_base 1: mod_base = OTHER; note = misc_feature - bicyclic nucleic acid scaffold modification
  modified_base 8: mod_base = OTHER; note = misc_feature - bicyclic nucleic acid scaffold modification
  modified_base 22: mod_base = OTHER; note = misc_feature - bicyclic nucleic acid scaffold modification
  source 1..22: mol_type = other RNA
caatgttctgacaacagtttgc

SEQ ID NO: 4208 - RNA, 22 nt, synthetic construct
  misc_feature 1..22: note = Antisense oligonucleotide
  modified_base 1: mod_base = OTHER; note = misc_feature - bicyclic nucleic acid scaffold modification
  modified_base 8: mod_base = OTHER; note = misc_feature - bicyclic nucleic acid scaffold modification
  modified_base 12: mod_base = OTHER; note = misc_feature - bicyclic nucleic acid scaffold modification
  modified_base 22: mod_base = OTHER; note = misc_feature - bicyclic nucleic acid scaffold modification
  source 1..22: mol_type = other RNA
caatgttctgacaacagtttgc

SEQ ID NO: 4209 - RNA, 22 nt, synthetic construct
  misc_feature 1..22: note = Antisense oligonucleotide
  modified_base 1: mod_base = OTHER; note = misc_feature - bicyclic nucleic acid scaffold modification
  modified_base 8: mod_base = OTHER; note = misc_feature - bicyclic nucleic acid scaffold modification
  modified_base 15: mod_base = OTHER; note = misc_feature - bicyclic nucleic acid scaffold modification
  modified_base 22: mod_base = OTHER; note = misc_feature - bicyclic nucleic acid scaffold modification
  source 1..22: mol_type = other RNA
caatgttctgacaacagtttgc

SEQ ID NO: 4210 - RNA, 22 nt, synthetic construct
  misc_feature 1..22: note = Antisense oligonucleotide
  modified_base 1: mod_base = OTHER; note = misc_feature - bicyclic nucleic acid scaffold modification
  modified_base 5: mod_base = OTHER; note = misc_feature - bicyclic nucleic acid scaffold modification
  modified_base 10: mod_base = OTHER; note = misc_feature - bicyclic nucleic acid scaffold modification
  modified_base 17: mod_base = OTHER; note = misc_feature - bicyclic nucleic acid scaffold modification
  modified_base 22: mod_base = OTHER; note = misc_feature - bicyclic nucleic acid scaffold modification
  source 1..22: mol_type = other RNA
caatgttctgacaacagtttgc

SEQ ID NO: 4211 - RNA, 22 nt, synthetic construct
  misc_feature 1..22: note = Antisense oligonucleotide
  modified_base 1..2: mod_base = OTHER; note = misc_feature - bicyclic nucleic acid scaffold modification
  modified_base 10: mod_base = OTHER; note = misc_feature - bicyclic nucleic acid scaffold modification
  modified_base 21..22: mod_base = OTHER; note = misc_feature - bicyclic nucleic acid scaffold modification
  source 1..22: mol_type = other RNA
caatgttctgacaacagtttgc

SEQ ID NO: 4212 - RNA, 22 nt, synthetic construct
  misc_feature 1..22: note = Antisense oligonucleotide
  modified_base 1..2: mod_base = OTHER; note = misc_feature - bicyclic nucleic acid scaffold modification
  modified_base 17: mod_base = OTHER; note = misc_feature - bicyclic nucleic acid scaffold modification
  modified_base 21..22: mod_base = OTHER; note = misc_feature - bicyclic nucleic acid scaffold modification
  source 1..22: mol_type = other RNA
caatgttctgacaacagtttgc

SEQ ID NO: 4213 - RNA, 22 nt, synthetic construct
  misc_feature 1..22: note = Antisense oligonucleotide
  modified_base 1..2: mod_base = OTHER; note = misc_feature - bicyclic nucleic acid scaffold modification
  modified_base 5: mod_base = OTHER; note = misc_feature - bicyclic nucleic acid scaffold modification
  modified_base 17: mod_base = OTHER; note = misc_feature - bicyclic nucleic acid scaffold modification
  modified_base 21..22: mod_base = OTHER; note = misc_feature - bicyclic nucleic acid scaffold modification
  source 1..22: mol_type = other RNA
caatgttctgacaacagtttgc

SEQ ID NO: 4214 - RNA, 20 nt, synthetic construct
  modified_base 20: mod_base = OTHER; note = thymine
  misc_feature 1..20: note = Antisense oligonucleotide
  modified_base 1: mod_base = OTHER; note = misc_feature - bicyclic nucleic acid scaffold modification
  modified_base 20: mod_base = OTHER; note = misc_feature - bicyclic nucleic acid scaffold modification
  source 1..20: mol_type = other RNA
caatgttctgacaacagttt

SEQ ID NO: 4215 - RNA, 20 nt, synthetic construct
  modified_base 20: mod_base = OTHER; note = thymine
  misc_feature 1..20: note = Antisense oligonucleotide
  modified_base 1: mod_base = OTHER; note = misc_feature - bicyclic nucleic acid scaffold modification
  modified_base 5: mod_base = OTHER; note = misc_feature - bicyclic nucleic acid scaffold modification
  modified_base 20: mod_base = OTHER; note = misc_feature - bicyclic nucleic acid scaffold modification
  source 1..20: mol_type = other RNA
caatgttctgacaacagttt

SEQ ID NO: 4216 - RNA, 20 nt, synthetic construct
  modified_base 20: mod_base = OTHER; note = thymine
  misc_feature 1..20: note = Antisense oligonucleotide
  modified_base 1: mod_base = OTHER; note = misc_feature - bicyclic nucleic acid scaffold modification
  modified_base 10: mod_base = OTHER; note = misc_feature - bicyclic nucleic acid scaffold modification
  modified_base 20: mod_base = OTHER; note = misc_feature - bicyclic nucleic acid scaffold modification
  source 1..20: mol_type = other RNA
caatgttctgacaacagttt

SEQ ID NO: 4217 - RNA, 20 nt, synthetic construct
  modified_base 20: mod_base = OTHER; note = thymine
  misc_feature 1..20: note = Antisense oligonucleotide
  modified_base 1: mod_base = OTHER; note = misc_feature - bicyclic nucleic acid scaffold modification
  modified_base 17: mod_base = OTHER; note = misc_feature - bicyclic nucleic acid scaffold modification
  modified_base 20: mod_base = OTHER; note = misc_feature - bicyclic nucleic acid scaffold modification
  source 1..20: mol_type = other RNA
caatgttctgacaacagttt

SEQ ID NO: 4218 - RNA, 20 nt, synthetic construct
  modified_base 20: mod_base = OTHER; note = thymine
  misc_feature 1..20: note = Antisense oligonucleotide
  modified_base 1: mod_base = OTHER; note = misc_feature - bicyclic nucleic acid scaffold modification
  modified_base 10: mod_base = OTHER; note = misc_feature - bicyclic nucleic acid scaffold modification
  modified_base 17: mod_base = OTHER; note = misc_feature - bicyclic nucleic acid scaffold modification
  modified_base 20: mod_base = OTHER; note = misc_feature - bicyclic nucleic acid scaffold modification
  source 1..20: mol_type = other RNA
caatgttctgacaacagttt

SEQ ID NO: 4219 - RNA, 20 nt, synthetic construct
  modified_base 20: mod_base = OTHER; note = thymine
  misc_feature 1..20: note = Antisense oligonucleotide
  modified_base 1: mod_base = OTHER; note = misc_feature - bicyclic nucleic acid scaffold modification
  modified_base 5: mod_base = OTHER; note = misc_feature - bicyclic nucleic acid scaffold modification
  modified_base 10: mod_base = OTHER; note = misc_feature - bicyclic nucleic acid scaffold modification
  modified_base 20: mod_base = OTHER; note = misc_feature - bicyclic nucleic acid scaffold modification
  source 1..20: mol_type = other RNA
caatgttctgacaacagttt

SEQ ID NO: 4220 - RNA, 20 nt, synthetic construct
  modified_base 20: mod_base = OTHER; note = thymine
  misc_feature 1..20: note = Antisense oligonucleotide
  modified_base 1: mod_base = OTHER; note = misc_feature - bicyclic nucleic acid scaffold modification
  modified_base 5: mod_base = OTHER; note = misc_feature - bicyclic nucleic acid scaffold modification
  modified_base 17: mod_base = OTHER; note = misc_feature - bicyclic nucleic acid scaffold modification
  modified_base 20: mod_base = OTHER; note = misc_feature - bicyclic nucleic acid scaffold modification
  source 1..20: mol_type = other RNA
caatgttctgacaacagttt

SEQ ID NO: 4221 - RNA, 20 nt, synthetic construct
  modified_base 20: mod_base = OTHER; note = thymine
  misc_feature 1..20: note = Antisense oligonucleotide
  modified_base 1: mod_base = OTHER; note = misc_feature - bicyclic nucleic acid scaffold modification
  modified_base 20: mod_base = OTHER; note = misc_feature - bicyclic nucleic acid scaffold modification
  source 1..20: mol_type = other RNA
caatgttctgacaacagttt

SEQ ID NO: 4222 - RNA, 20 nt, synthetic construct
  modified_base 20: mod_base = OTHER; note = thymine
  misc_feature 1..20: note = Antisense oligonucleotide
  modified_base 1: mod_base = OTHER; note = misc_feature - bicyclic nucleic acid scaffold modification
  modified_base 15: mod_base = OTHER; note = misc_feature - bicyclic nucleic acid scaffold modification
  modified_base 20: mod_base = OTHER; note = misc_feature - bicyclic nucleic acid scaffold modification
  source 1..20: mol_type = other RNA
caatgttctgacaacagttt

SEQ ID NO: 4223 - RNA, 20 nt, synthetic construct
  modified_base 20: mod_base = OTHER; note = thymine
  misc_feature 1..20: note = Antisense oligonucleotide
  modified_base 1: mod_base = OTHER; note = misc_feature - bicyclic nucleic acid scaffold modification
  modified_base 8: mod_base = OTHER; note = misc_feature - bicyclic nucleic acid scaffold modification
  modified_base 12: mod_base = OTHER; note = misc_feature - bicyclic nucleic acid scaffold modification
  modified_base 20: mod_base = OTHER; note = misc_feature - bicyclic nucleic acid scaffold modification
  source 1..20: mol_type = other RNA
caatgttctgacaacagttt

SEQ ID NO: 4224 - RNA, 20 nt, synthetic construct
  modified_base 20: mod_base = OTHER; note = thymine
  misc_feature 1..20: note = Antisense oligonucleotide
  modified_base 1: mod_base = OTHER; note = misc_feature - bicyclic nucleic acid scaffold modification
  modified_base 8: mod_base = OTHER; note = misc_feature - bicyclic nucleic acid scaffold modification
  modified_base 15: mod_base = OTHER; note = misc_feature - bicyclic nucleic acid scaffold modification
  modified_base 20: mod_base = OTHER; note = misc_feature - bicyclic nucleic acid scaffold modification
  source 1..20: mol_type = other RNA
caatgttctgacaacagttt

SEQ ID NO: 4225 - RNA, 20 nt, synthetic construct
  modified_base 19..20: mod_base = OTHER; note = thymine
  misc_feature 1..20: note = Antisense oligonucleotide
  modified_base 1..2: mod_base = OTHER; note = misc_feature - bicyclic nucleic acid scaffold modification
  modified_base 19..20: mod_base = OTHER; note = misc_feature - bicyclic nucleic acid scaffold modification
  source 1..20: mol_type = other RNA
caatgttctgacaacagttt

SEQ ID NO: 4226 - RNA, 20 nt, synthetic construct
  modified_base 19..20: mod_base = OTHER; note = thymine
  misc_feature 1..20: note = Antisense oligonucleotide
  modified_base 1..2: mod_base = OTHER; note = misc_feature - bicyclic nucleic acid scaffold modification
  modified_base 10: mod_base = OTHER; note = misc_feature - bicyclic nucleic acid scaffold modification
  modified_base 19..20: mod_base = OTHER; note = misc_feature - bicyclic nucleic acid scaffold modification
  source 1..20: mol_type = other RNA
caatgttctgacaacagttt

SEQ ID NO: 4227 - RNA, 20 nt, synthetic construct
  modified_base 19..20: mod_base = OTHER; note = thymine
  misc_feature 1..20: note = Antisense oligonucleotide
  modified_base 1..2: mod_base = OTHER; note = misc_feature - bicyclic nucleic acid scaffold modification
  modified_base 8: mod_base = OTHER; note = misc_feature - bicyclic nucleic acid scaffold modification
  modified_base 15: mod_base = OTHER; note = misc_feature - bicyclic nucleic acid scaffold modification
  modified_base 19..20: mod_base = OTHER; note = misc_feature - bicyclic nucleic acid scaffold modification
  source 1..20: mol_type = other RNA
caatgttctgacaacagttt

SEQ ID NO: 4228 - RNA, 20 nt, synthetic construct
  misc_feature 1..20: note = Antisense oligonucleotide
  modified_base 1: mod_base = OTHER; note = misc_feature - bicyclic nucleic acid scaffold modification
  modified_base 20: mod_base = OTHER; note = misc_feature - bicyclic nucleic acid scaffold modification
  source 1..20: mol_type = other RNA
aatgttctgacaacagtttg

SEQ ID NO: 4229 - RNA, 20 nt, synthetic construct
  misc_feature 1..20: note = Antisense oligonucleotide
  modified_base 1: mod_base = OTHER; note = misc_feature - bicyclic nucleic acid scaffold modification
  modified_base 16: mod_base = OTHER; note = misc_feature - bicyclic nucleic acid scaffold modification
  modified_base 20: mod_base = OTHER; note = misc_feature - bicyclic nucleic acid scaffold modification
  source 1..20: mol_type = other RNA
aatgttctgacaacagtttg

SEQ ID NO: 4230 - RNA, 20 nt, synthetic construct
  misc_feature 1..20: note = Antisense oligonucleotide
  modified_base 1: mod_base = OTHER; note = misc_feature - bicyclic nucleic acid scaffold modification
  modified_base 9: mod_base = OTHER; note = misc_feature - bicyclic nucleic acid scaffold modification
  modified_base 20: mod_base = OTHER; note = misc_feature - bicyclic nucleic acid scaffold modification
  source 1..20: mol_type = other RNA
aatgttctgacaacagtttg

SEQ ID NO: 4231 - RNA, 20 nt, synthetic construct
  misc_feature 1..20: note = Antisense oligonucleotide
  modified_base 1: mod_base = OTHER; note = misc_feature - bicyclic nucleic acid scaffold modification
  modified_base 4: mod_base = OTHER; note = misc_feature - bicyclic nucleic acid scaffold modification
  modified_base 20: mod_base = OTHER; note = misc_feature - bicyclic nucleic acid scaffold modification
  source 1..20: mol_type = other RNA
aatgttctgacaacagtttg

SEQ ID NO: 4232 - RNA, 20 nt, synthetic construct
  misc_feature 1..20: note = Antisense oligonucleotide
  modified_base 1: mod_base = OTHER; note = misc_feature - bicyclic nucleic acid scaffold modification
  modified_base 4: mod_base = OTHER; note = misc_feature - bicyclic nucleic acid scaffold modification
  modified_base 9: mod_base = OTHER; note = misc_feature - bicyclic nucleic acid scaffold modification
  modified_base 20: mod_base = OTHER; note = misc_feature - bicyclic nucleic acid scaffold modification
  source 1..20: mol_type = other RNA
aatgttctgacaacagtttg

SEQ ID NO: 4233 - RNA, 20 nt, synthetic construct
  misc_feature 1..20: note = Antisense oligonucleotide
  modified_base 1: mod_base = OTHER; note = misc_feature - bicyclic nucleic acid scaffold modification
  modified_base 9: mod_base = OTHER; note = misc_feature - bicyclic nucleic acid scaffold modification
  modified_base 16: mod_base = OTHER; note = misc_feature - bicyclic nucleic acid scaffold modification
  modified_base 20: mod_base = OTHER; note = misc_feature - bicyclic nucleic acid scaffold modification
  source 1..20: mol_type = other RNA
aatgttctgacaacagtttg

SEQ ID NO: 4234 - RNA, 20 nt, synthetic construct
  misc_feature 1..20: note = Antisense oligonucleotide
  modified_base 1: mod_base = OTHER; note = misc_feature - bicyclic nucleic acid scaffold modification
  modified_base 4: mod_base = OTHER; note = misc_feature - bicyclic nucleic acid scaffold modification
  modified_base 16: mod_base = OTHER; note = misc_feature - bicyclic nucleic acid scaffold modification
  modified_base 20: mod_base = OTHER; note = misc_feature - bicyclic nucleic acid scaffold modification
  source 1..20: mol_type = other RNA
aatgttctgacaacagtttg

SEQ ID NO: 4235 - RNA, 20 nt, synthetic construct
  misc_feature 1..20: note = Antisense oligonucleotide
  modified_base 1: mod_base = OTHER; note = misc_feature - bicyclic nucleic acid scaffold modification
  modified_base 14: mod_base = OTHER; note = misc_feature - bicyclic nucleic acid scaffold modification
  modified_base 20: mod_base = OTHER; note = misc_feature - bicyclic nucleic acid scaffold modification
  source 1..20: mol_type = other RNA
aatgttctgacaacagtttg

SEQ ID NO: 4236 - RNA, 20 nt, synthetic construct
  misc_feature 1..20: note = Antisense oligonucleotide
  modified_base 1: mod_base = OTHER; note = misc_feature - bicyclic nucleic acid scaffold modification
  modified_base 11: mod_base = OTHER; note = misc_feature - bicyclic nucleic acid scaffold modification
  modified_base 20: mod_base = OTHER; note = misc_feature - bicyclic nucleic acid scaffold modification
  source 1..20: mol_type = other RNA
aatgttctgacaacagtttg

SEQ ID NO: 4237 - RNA, 20 nt, synthetic construct
  misc_feature 1..20: note = Antisense oligonucleotide
  modified_base 1: mod_base = OTHER; note = misc_feature - bicyclic nucleic acid scaffold modification
  modified_base 7: mod_base = OTHER; note = misc_feature - bicyclic nucleic acid scaffold modification
  modified_base 20: mod_base = OTHER; note = misc_feature - bicyclic nucleic acid scaffold modification
  source 1..20: mol_type = other RNA
aatgttctgacaacagtttg

SEQ ID NO: 4238 - RNA, 20 nt, synthetic construct
  misc_feature 1..20: note = Antisense oligonucleotide
  modified_base 1: mod_base = OTHER; note = misc_feature - bicyclic nucleic acid scaffold modification
  modified_base 7: mod_base = OTHER; note = misc_feature - bicyclic nucleic acid scaffold modification
  modified_base 11: mod_base = OTHER; note = misc_feature - bicyclic nucleic acid scaffold modification
  modified_base 20: mod_base = OTHER; note = misc_feature - bicyclic nucleic acid scaffold modification
  source 1..20: mol_type = other RNA
aatgttctgacaacagtttg

SEQ ID NO: 4239 - RNA, 20 nt, synthetic construct
  misc_feature 1..20: note = Antisense oligonucleotide
  modified_base 1: mod_base = OTHER; note = misc_feature - bicyclic nucleic acid scaffold modification
  modified_base 7: mod_base = OTHER; note = misc_feature - bicyclic nucleic acid scaffold modification
  modified_base 14: mod_base = OTHER; note = misc_feature - bicyclic nucleic acid scaffold modification
  modified_base 20: mod_base = OTHER; note = misc_feature - bicyclic nucleic acid scaffold modification
  source 1..20: mol_type = other RNA
aatgttctgacaacagtttg

SEQ ID NO: 4240 - RNA, 20 nt, synthetic construct
  modified_base 19: mod_base = OTHER; note = thymine
  misc_feature 1..20: note = Antisense oligonucleotide
  modified_base 1..2: mod_base = OTHER; note = misc_feature - bicyclic nucleic acid scaffold modification
  modified_base 7: mod_base = OTHER; note = misc_feature - bicyclic nucleic acid scaffold modification
  modified_base 14: mod_base = OTHER; note = misc_feature - bicyclic nucleic acid scaffold modification
  modified_base 19..20: mod_base = OTHER; note = misc_feature - bicyclic nucleic acid scaffold modification
  source 1..20: mol_type = other RNA
aatgttctgacaacagtttg

SEQ ID NO: 4241 - RNA, 20 nt, synthetic construct
  modified_base 19: mod_base = OTHER; note = thymine
  misc_feature 1..20: note = Antisense oligonucleotide
  modified_base 1..2: mod_base = OTHER; note = misc_feature - bicyclic nucleic acid scaffold modification
  modified_base 19..20: mod_base = OTHER; note = misc_feature - bicyclic nucleic acid scaffold modification
  source 1..20: mol_type = other RNA
aatgttctgacaacagtttg

SEQ ID NO: 4242 - RNA, 20 nt, synthetic construct
  modified_base 19: mod_base = OTHER; note = thymine
  misc_feature 1..20: note = Antisense oligonucleotide
  modified_base 1..2: mod_base = OTHER; note = misc_feature - bicyclic nucleic acid scaffold modification
  modified_base 9: mod_base = OTHER; note = misc_feature - bicyclic nucleic acid scaffold modification
  modified_base 19..20: mod_base = OTHER; note = misc_feature - bicyclic nucleic acid scaffold modification
  source 1..20: mol_type = other RNA
aatgttctgacaacagtttg

SEQ ID NO: 4243 - RNA, 20 nt, synthetic construct
  modified_base 19: mod_base = OTHER; note = thymine
  misc_feature 1..20: note = Antisense oligonucleotide
  modified_base 1..2: mod_base = OTHER; note = misc_feature - bicyclic nucleic acid scaffold modification
  modified_base 9: mod_base = OTHER; note = misc_feature - bicyclic nucleic acid scaffold modification
  modified_base 16: mod_base = OTHER; note = misc_feature - bicyclic nucleic acid scaffold modification
  modified_base 19..20: mod_base = OTHER; note = misc_feature - bicyclic nucleic acid scaffold modification
  source 1..20: mol_type = other RNA
aatgttctgacaacagtttg

SEQ ID NO: 4244 - RNA, 20 nt, synthetic construct
  misc_feature 1..20: note = Antisense oligonucleotide
  modified_base 1: mod_base = OTHER; note = misc_feature - bicyclic nucleic acid scaffold modification
  modified_base 20: mod_base = OTHER; note = misc_feature - bicyclic nucleic acid scaffold modification
  source 1..20: mol_type = other RNA
atgttctgacaacagtttgc

SEQ ID NO: 4245 - RNA, 20 nt, synthetic construct
  misc_feature 1..20: note = Antisense oligonucleotide
  modified_base 1: mod_base = OTHER; note = misc_feature - bicyclic nucleic acid scaffold modification
  modified_base 3: mod_base = OTHER; note = misc_feature - bicyclic nucleic acid scaffold modification
  modified_base 20: mod_base = OTHER; note = misc_feature - bicyclic nucleic acid scaffold modification
  source 1..20: mol_type = other RNA
atgttctgacaacagtttgc

SEQ ID NO: 4246 - RNA, 20 nt, synthetic construct
  misc_feature 1..20: note = Antisense oligonucleotide
  modified_base 1: mod_base = OTHER; note = misc_feature - bicyclic nucleic acid scaffold modification
  modified_base 8: mod_base = OTHER; note = misc_feature - bicyclic nucleic acid scaffold modification
  modified_base 20: mod_base = OTHER; note = misc_feature - bicyclic nucleic acid scaffold modification
  source 1..20: mol_type = other RNA
atgttctgacaacagtttgc

SEQ ID NO: 4247 - RNA, 20 nt, synthetic construct
  misc_feature 1..20: note = Antisense oligonucleotide
  modified_base 1: mod_base = OTHER; note = misc_feature - bicyclic nucleic acid scaffold modification
  modified_base 15: mod_base = OTHER; note = misc_feature - bicyclic nucleic acid scaffold modification
  modified_base 20: mod_base = OTHER; note = misc_feature - bicyclic nucleic acid scaffold modification
  source 1..20: mol_type = other RNA
atgttctgacaacagtttgc

SEQ ID NO: 4248 - RNA, 20 nt, synthetic construct
  misc_feature 1..20: note = Antisense oligonucleotide
  modified_base 1: mod_base = OTHER; note = misc_feature - bicyclic nucleic acid scaffold modification
  modified_base 8: mod_base = OTHER; note = misc_feature - bicyclic nucleic acid scaffold modification
  modified_base 15: mod_base = OTHER; note = misc_feature - bicyclic nucleic acid scaffold modification
  modified_base 20: mod_base = OTHER; note = misc_feature - bicyclic nucleic acid scaffold modification
  source 1..20: mol_type = other RNA
atgttctgacaacagtttgc

SEQ ID NO: 4249 - RNA, 20 nt, synthetic construct
  misc_feature 1..20: note = Antisense oligonucleotide
  modified_base 1: mod_base = OTHER; note = misc_feature - bicyclic nucleic acid scaffold modification
  modified_base 3: mod_base = OTHER; note = misc_feature - bicyclic nucleic acid scaffold modification
  modified_base 8: mod_base = OTHER; note = misc_feature - bicyclic nucleic acid scaffold modification
  modified_base 20: mod_base = OTHER; note = misc_feature - bicyclic nucleic acid scaffold modification
  source 1..20: mol_type = other RNA
atgttctgacaacagtttgc

SEQ ID NO: 4250 - RNA, 20 nt, synthetic construct
  misc_feature 1..20: note = Antisense oligonucleotide
  modified_base 1: mod_base = OTHER; note = misc_feature - bicyclic nucleic acid scaffold modification
  modified_base 6: mod_base = OTHER; note = misc_feature - bicyclic nucleic acid scaffold modification
  modified_base 20: mod_base = OTHER; note = misc_feature - bicyclic nucleic acid scaffold modification
  source 1..20: mol_type = other RNA
atgttctgacaacagtttgc

SEQ ID NO: 4251 - RNA, 20 nt, synthetic construct
  misc_feature 1..20: note = Antisense oligonucleotide
  modified_base 1: mod_base = OTHER; note = misc_feature - bicyclic nucleic acid scaffold modification
  modified_base 10: mod_base = OTHER; note = misc_feature - bicyclic nucleic acid scaffold modification
  modified_base 20: mod_base = OTHER; note = misc_feature - bicyclic nucleic acid scaffold modification
  source 1..20: mol_type = other RNA
atgttctgacaacagtttgc

SEQ ID NO: 4252 - RNA, 20 nt, synthetic construct
  misc_feature 1..20: note = Antisense oligonucleotide
  modified_base 1: mod_base = OTHER; note = misc_feature - bicyclic nucleic acid scaffold modification
  modified_base 13: mod_base = OTHER; note = misc_feature - bicyclic nucleic acid scaffold modification
  modified_base 20: mod_base = OTHER; note = misc_feature - bicyclic nucleic acid scaffold modification
  source 1..20: mol_type = other RNA
atgttctgacaacagtttgc

SEQ ID NO: 4253 - RNA, 20 nt, synthetic construct
  misc_feature 1..20: note = Antisense oligonucleotide
  modified_base 1: mod_base = OTHER; note = misc_feature - bicyclic nucleic acid scaffold modification
  modified_base 6: mod_base = OTHER; note = misc_feature - bicyclic nucleic acid scaffold modification
  modified_base 13: mod_base = OTHER; note = misc_feature - bicyclic nucleic acid scaffold modification
  modified_base 20: mod_base = OTHER; note = misc_feature - bicyclic nucleic acid scaffold modification
  source 1..20: mol_type = other RNA
atgttctgacaacagtttgc

SEQ ID NO: 4254 - RNA, 20 nt, synthetic construct
  misc_feature 1..20: note = Antisense oligonucleotide
  modified_base 1: mod_base = OTHER; note = misc_feature - bicyclic nucleic acid scaffold modification
  modified_base 20: mod_base = OTHER; note = misc_feature - bicyclic nucleic acid scaffold modification
  source 1..20: mol_type = other RNA
atgttctgacaacagtttgc

SEQ ID NO: 4255 - RNA, 20 nt, synthetic construct
  modified_base 2: mod_base = OTHER; note = thymine
  misc_feature 1..20: note = Antisense oligonucleotide
  modified_base 1..2: mod_base = OTHER; note = misc_feature - bicyclic nucleic acid scaffold modification
  modified_base 19..20: mod_base = OTHER; note = misc_feature - bicyclic nucleic acid scaffold modification
  source 1..20: mol_type = other RNA
atgttctgacaacagtttgc

SEQ ID NO: 4256 - RNA, 20 nt, synthetic construct
  modified_base 2: mod_base = OTHER; note = thymine
  misc_feature 1..20: note = Antisense oligonucleotide
  modified_base 1..2: mod_base = OTHER; note = misc_feature - bicyclic nucleic acid scaffold modification
  modified_base 8: mod_base = OTHER; note = misc_feature - bicyclic nucleic acid scaffold modification
  modified_base 19..20: mod_base = OTHER; note = misc_feature - bicyclic nucleic acid scaffold modification
  source 1..20: mol_type = other RNA
atgttctgacaacagtttgc

SEQ ID NO: 4257 - RNA, 20 nt, synthetic construct
  modified_base 2: mod_base = OTHER; note = thymine
  misc_feature 1..20: note = Antisense oligonucleotide
  modified_base 1..2: mod_base = OTHER; note = misc_feature - bicyclic nucleic acid scaffold modification
  modified_base 8: mod_base = OTHER; note = misc_feature - bicyclic nucleic acid scaffold modification
  modified_base 15: mod_base = OTHER; note = misc_feature - bicyclic nucleic acid scaffold modification
  modified_base 19..20: mod_base = OTHER; note = misc_feature - bicyclic nucleic acid scaffold modification
  source 1..20: mol_type = other RNA
atgttctgacaacagtttgc

SEQ ID NO: 4258 - RNA, 18 nt, synthetic construct
  modified_base 18: mod_base = OTHER; note = thymine
  misc_feature 1..18: note = Antisense oligonucleotide
  modified_base 1: mod_base = OTHER; note = misc_feature - bicyclic nucleic acid scaffold modification
  modified_base 5: mod_base = OTHER; note = misc_feature - bicyclic nucleic acid scaffold modification
  modified_base 18: mod_base = OTHER; note = misc_feature - bicyclic nucleic acid scaffold modification
  source 1..18: mol_type = other RNA
caatgttctgacaacagt

SEQ ID NO: 4259 - RNA, 18 nt, synthetic construct
  modified_base 18: mod_base = OTHER; note = thymine
  misc_feature 1..18: note = Antisense oligonucleotide
  modified_base 1: mod_base = OTHER; note = misc_feature - bicyclic nucleic acid scaffold modification
  modified_base 10: mod_base = OTHER; note = misc_feature - bicyclic nucleic acid scaffold modification
  modified_base 18: mod_base = OTHER; note = misc_feature - bicyclic nucleic acid scaffold modification
  source 1..18: mol_type = other RNA
caatgttctgacaacagt

SEQ ID NO: 4260 - RNA, 18 nt, synthetic construct
  modified_base 18: mod_base = OTHER; note = thymine
  misc_feature 1..18: note = Antisense oligonucleotide
  modified_base 1: mod_base = OTHER; note = misc_feature - bicyclic nucleic acid scaffold modification
  modified_base 5: mod_base = OTHER; note = misc_feature - bicyclic nucleic acid scaffold modification
  modified_base 10: mod_base = OTHER; note = misc_feature - bicyclic nucleic acid scaffold modification
  modified_base 18: mod_base = OTHER; note = misc_feature - bicyclic nucleic acid scaffold modification
  source 1..18: mol_type = other RNA
caatgttctgacaacagt

SEQ ID NO: 4261 - RNA, 18 nt, synthetic construct
  modified_base 18: mod_base = OTHER; note = thymine
  misc_feature 1..18: note = Antisense oligonucleotide
  modified_base 1: mod_base = OTHER; note = misc_feature - bicyclic nucleic acid scaffold modification
  modified_base 12: mod_base = OTHER; note = misc_feature - bicyclic nucleic acid scaffold modification
  modified_base 15: mod_base = OTHER; note = misc_feature - bicyclic nucleic acid scaffold modification
  modified_base 18: mod_base = OTHER; note = misc_feature - bicyclic nucleic acid scaffold modification
  source 1..18: mol_type = other RNA
caatgttctgacaacagt

SEQ ID NO: 4262 - RNA, 18 nt, synthetic construct
  modified_base 18: mod_base = OTHER; note = thymine
  misc_feature 1..18: note = Antisense oligonucleotide
  modified_base 1: mod_base = OTHER; note = misc_feature - bicyclic nucleic acid scaffold modification
  modified_base 12: mod_base = OTHER; note = misc_feature - bicyclic nucleic acid scaffold modification
  modified_base 18: mod_base = OTHER; note = misc_feature - bicyclic nucleic acid scaffold modification
  source 1..18: mol_type = other RNA
caatgttctgacaacagt

SEQ ID NO: 4263 - RNA, 18 nt, synthetic construct
  modified_base 18: mod_base = OTHER; note = thymine
  misc_feature 1..18: note = Antisense oligonucleotide
  modified_base 1: mod_base = OTHER; note = misc_feature - bicyclic nucleic acid scaffold modification
  modified_base 8: mod_base = OTHER; note = misc_feature - bicyclic nucleic acid scaffold modification
  modified_base 12: mod_base = OTHER; note = misc_feature - bicyclic nucleic acid scaffold modification
  modified_base 18: mod_base = OTHER; note = misc_feature - bicyclic nucleic acid scaffold modification
  source 1..18: mol_type = other RNA
caatgttctgacaacagt

SEQ ID NO: 4264 - RNA, 18 nt, synthetic construct
  modified_base 18: mod_base = OTHER; note = thymine
  misc_feature 1..18: note = Antisense oligonucleotide
  modified_base 1: mod_base = OTHER; note = misc_feature - bicyclic nucleic acid scaffold modification
  modified_base 5: mod_base = OTHER; note = misc_feature - bicyclic nucleic acid scaffold modification
  modified_base 10: mod_base = OTHER; note = misc_feature - bicyclic nucleic acid scaffold modification
  modified_base 15: mod_base = OTHER; note = misc_feature - bicyclic nucleic acid scaffold modification
  modified_base 18: mod_base = OTHER; note = misc_feature - bicyclic nucleic acid scaffold modification
  source 1..18: mol_type = other RNA
caatgttctgacaacagt

SEQ ID NO: 4265 - RNA, 18 nt, synthetic construct
  modified_base 18: mod_base = OTHER; note = thymine
  misc_feature 1..18: note = Antisense oligonucleotide
  modified_base 1..2: mod_base = OTHER; note = misc_feature - bicyclic nucleic acid scaffold modification
  modified_base 17..18: mod_base = OTHER; note = misc_feature - bicyclic nucleic acid scaffold modification
  source 1..18: mol_type = other RNA
caatgttctgacaacagt

SEQ ID NO: 4266 - RNA, 18 nt, synthetic construct
  modified_base 18: mod_base = OTHER; note = thymine
  misc_feature 1..18: note = Antisense oligonucleotide
  modified_base 1..2: mod_base = OTHER; note = misc_feature - bicyclic nucleic acid scaffold modification
  modified_base 10: mod_base = OTHER; note = misc_feature - bicyclic nucleic acid scaffold modification
  modified_base 17..18: mod_base = OTHER; note = misc_feature - bicyclic nucleic acid scaffold modification
  source 1..18: mol_type = other RNA
caatgttctgacaacagt

SEQ ID NO: 4267 - RNA, 18 nt, synthetic construct
  modified_base 18: mod_base = OTHER; note = thymine
  misc_feature 1..18: note = Antisense oligonucleotide
  modified_base 1..2: mod_base = OTHER; note = misc_feature - bicyclic nucleic acid scaffold modification
  modified_base 5: mod_base = OTHER; note = misc_feature - bicyclic nucleic acid scaffold modification
  modified_base 10: mod_base = OTHER; note = misc_feature - bicyclic nucleic acid scaffold modification
  modified_base 17..18: mod_base = OTHER; note = misc_feature - bicyclic nucleic acid scaffold modification
  source 1..18: mol_type = other RNA
caatgttctgacaacagt

SEQ ID NO: 4268 - RNA, 18 nt, synthetic construct
  modified_base 18: mod_base = OTHER; note = thymine
  misc_feature 1..18: note = Antisense oligonucleotide
  modified_base 1: mod_base = OTHER; note = misc_feature - bicyclic nucleic acid scaffold modification
  modified_base 18: mod_base = OTHER; note = misc_feature - bicyclic nucleic acid scaffold modification
  source 1..18: mol_type = other RNA
aatgttctgacaacagtt

SEQ ID NO: 4269 - RNA, 18 nt, synthetic construct
  modified_base 18: mod_base = OTHER; note = thymine
  misc_feature 1..18: note = Antisense oligonucleotide
  modified_base 1: mod_base = OTHER; note = misc_feature - bicyclic nucleic acid scaffold modification
  modified_base 4: mod_base = OTHER; note = misc_feature - bicyclic nucleic acid scaffold modification
  modified_base 18: mod_base = OTHER; note = misc_feature - bicyclic nucleic acid scaffold modification
  source 1..18: mol_type = other RNA
aatgttctgacaacagtt

SEQ ID NO: 4270 - RNA, 18 nt, synthetic construct
  modified_base 18: mod_base = OTHER; note = thymine
  misc_feature 1..18: note = Antisense oligonucleotide
  modified_base 1: mod_base = OTHER; note = misc_feature - bicyclic nucleic acid scaffold modification
  modified_base 9: mod_base = OTHER; note = misc_feature - bicyclic nucleic acid scaffold modification
  modified_base 18: mod_base = OTHER; note = misc_feature - bicyclic nucleic acid scaffold modification
  source 1..18: mol_type = other RNA
aatgttctgacaacagtt

SEQ ID NO: 4271 - RNA, 18 nt, synthetic construct
  modified_base 18: mod_base = OTHER; note = thymine
  misc_feature 1..18: note = Antisense oligonucleotide
  modified_base 1: mod_base = OTHER; note = misc_feature - bicyclic nucleic acid scaffold modification
  modified_base 16: mod_base = OTHER; note = misc_feature - bicyclic nucleic acid scaffold modification
  modified_base 18: mod_base = OTHER; note = misc_feature - bicyclic nucleic acid scaffold modification
  source 1..18: mol_type = other RNA
aatgttctgacaacagtt

SEQ ID NO: 4272 - RNA, 18 nt, synthetic construct
  modified_base 18: mod_base = OTHER; note = thymine
  misc_feature 1..18: note = Antisense oligonucleotide
  modified_base 1: mod_base = OTHER; note = misc_feature - bicyclic nucleic acid scaffold modification
  modified_base 3: mod_base = OTHER; note = misc_feature - bicyclic nucleic acid scaffold modification
  modified_base 16: mod_base = OTHER; note = misc_feature - bicyclic nucleic acid scaffold modification
  modified_base 18: mod_base = OTHER; note = misc_feature - bicyclic nucleic acid scaffold modification
  source 1..18: mol_type = other RNA
aatgttctgacaacagtt

SEQ ID NO: 4273 - RNA, 18 nt, synthetic construct
  modified_base 18: mod_base = OTHER; note = thymine
  misc_feature 1..18: note = Antisense oligonucleotide
  modified_base 1: mod_base = OTHER; note = misc_feature - bicyclic nucleic acid scaffold modification
  modified_base 4: mod_base = OTHER; note = misc_feature - bicyclic nucleic acid scaffold modification
  modified_base 9: mod_base = OTHER; note = misc_feature - bicyclic nucleic acid scaffold modification
  modified_base 18: mod_base = OTHER; note = misc_feature - bicyclic nucleic acid scaffold modification
  source 1..18: mol_type = other RNA
aatgttctgacaacagtt

SEQ ID NO: 4274 - RNA, 18 nt, synthetic construct
  modified_base 18: mod_base = OTHER; note = thymine
  misc_feature 1..18: note = Antisense oligonucleotide
  modified_base 1: mod_base = OTHER; note = misc_feature - bicyclic nucleic acid scaffold modification
  modified_base 9: mod_base = OTHER; note = misc_feature - bicyclic nucleic acid scaffold modification
  modified_base 16: mod_base = OTHER; note = misc_feature - bicyclic nucleic acid scaffold modification
  modified_base 18: mod_base = OTHER; note = misc_feature - bicyclic nucleic acid scaffold modification
  source 1..18: mol_type = other RNA
aatgttctgacaacagtt

SEQ ID NO: 4275 - RNA, 18 nt, synthetic construct
  modified_base 18: mod_base = OTHER; note = thymine
  misc_feature 1..18: note = Antisense oligonucleotide
  modified_base 1: mod_base = OTHER; note = misc_feature - bicyclic nucleic acid scaffold modification
  modified_base 14: mod_base = OTHER; note = misc_feature - bicyclic nucleic acid scaffold modification
  modified_base 18: mod_base = OTHER; note = misc_feature - bicyclic nucleic acid scaffold modification
  source 1..18: mol_type = other RNA
aatgttctgacaacagtt

SEQ ID NO: 4276 - RNA, 18 nt, synthetic construct
  modified_base 18: mod_base = OTHER; note = thymine
  misc_feature 1..18: note = Antisense oligonucleotide
  modified_base 1: mod_base = OTHER; note = misc_feature - bicyclic nucleic acid scaffold modification
  modified_base 7: mod_base = OTHER; note = misc_feature - bicyclic nucleic acid scaffold modification
  modified_base 18: mod_base = OTHER; note = misc_feature - bicyclic nucleic acid scaffold modification
  source 1..18: mol_type = other RNA
aatgttctgacaacagtt

SEQ ID NO: 4277 - RNA, 18 nt, synthetic construct
  modified_base 18: mod_base = OTHER; note = thymine
  misc_feature 1..18: note = Antisense oligonucleotide
  modified_base 1: mod_base = OTHER; note = misc_feature - bicyclic nucleic acid scaffold modification
  modified_base 7: mod_base = OTHER; note = misc_feature - bicyclic nucleic acid scaffold modification
  modified_base 14: mod_base = OTHER; note = misc_feature - bicyclic nucleic acid scaffold modification
  modified_base 18: mod_base = OTHER; note = misc_feature - bicyclic nucleic acid scaffold modification
  source 1..18: mol_type = other RNA
aatgttctgacaacagtt

SEQ ID NO: 4278 - RNA, 18 nt, synthetic construct
  modified_base 17..18: mod_base = OTHER; note = thymine
  misc_feature 1..18: note = Antisense oligonucleotide
  modified_base 1..2: mod_base = OTHER; note = misc_feature - bicyclic nucleic acid scaffold modification
  modified_base 17..18: mod_base = OTHER; note = misc_feature - bicyclic nucleic acid scaffold modification
  source 1..18: mol_type = other RNA
aatgttctgacaacagtt

SEQ ID NO: 4279 - RNA, 18 nt, synthetic construct
  modified_base 17..18: mod_base = OTHER; note = thymine
  misc_feature 1..18: note = Antisense oligonucleotide
  modified_base 1..2: mod_base = OTHER; note = misc_feature - bicyclic nucleic acid scaffold modification
  modified_base 9: mod_base = OTHER; note = misc_feature - bicyclic nucleic acid scaffold modification
  modified_base 17..18: mod_base = OTHER; note = misc_feature - bicyclic nucleic acid scaffold modification
  source 1..18: mol_type = other RNA
aatgttctgacaacagtt

SEQ ID NO: 4280 - RNA, 18 nt, synthetic construct
  modified_base 17..18: mod_base = OTHER; note = thymine
  misc_feature 1..18: note = Antisense oligonucleotide
  modified_base 1..2: mod_base = OTHER; note = misc_feature - bicyclic nucleic acid scaffold modification
  modified_base 4: mod_base = OTHER; note = misc_feature - bicyclic nucleic acid scaffold modification
  modified_base 9: mod_base = OTHER; note = misc_feature - bicyclic nucleic acid scaffold modification
  modified_base 17..18: mod_base = OTHER; note = misc_feature - bicyclic nucleic acid scaffold modification
  source 1..18: mol_type = other RNA
aatgttctgacaacagtt

SEQ ID NO: 4281 - RNA, 18 nt, synthetic construct
  modified_base 18: mod_base = OTHER; note = thymine
  misc_feature 1..18: note = Antisense oligonucleotide
  modified_base 1: mod_base = OTHER; note = misc_feature - bicyclic nucleic acid scaffold modification
  modified_base 18: mod_base = OTHER; note = misc_feature - bicyclic nucleic acid scaffold modification
  source 1..18: mol_type = other RNA
atgttctgacaacagttt

SEQ ID NO: 4282 - RNA, 18 nt, synthetic construct
  modified_base 18: mod_base = OTHER; note = thymine
  misc_feature 1..18: note = Antisense oligonucleotide
  modified_base 1: mod_base = OTHER; note = misc_feature - bicyclic nucleic acid scaffold modification
  modified_base 3: mod_base = OTHER; note = misc_feature - bicyclic nucleic acid scaffold modification
  modified_base 18: mod_base = OTHER; note = misc_feature - bicyclic nucleic acid scaffold modification
  source 1..18: mol_type = other RNA
atgttctgacaacagttt

SEQ ID NO: 4283 - RNA, 18 nt, synthetic construct
  modified_base 18: mod_base = OTHER; note = thymine
  misc_feature 1..18: note = Antisense oligonucleotide
  modified_base 1: mod_base = OTHER; note = misc_feature - bicyclic nucleic acid scaffold modification
  modified_base 8: mod_base = OTHER; note = misc_feature - bicyclic nucleic acid scaffold modification
  modified_base 18: mod_base = OTHER; note = misc_feature - bicyclic nucleic acid scaffold modification
  source 1..18: mol_type = other RNA
atgttctgacaacagttt

SEQ ID NO: 4284 - RNA, 18 nt, synthetic construct
  modified_base 18: mod_base = OTHER; note = thymine
  misc_feature 1..18: note = Antisense oligonucleotide
  modified_base 1: mod_base = OTHER; note = misc_feature - bicyclic nucleic acid scaffold modification
  modified_base 15: mod_base = OTHER; note = misc_feature - bicyclic nucleic acid scaffold modification
  modified_base 18: mod_base = OTHER; note = misc_feature - bicyclic nucleic acid scaffold modification
  source 1..18: mol_type = other RNA
atgttctgacaacagttt

SEQ ID NO: 4285 - RNA, 18 nt, synthetic construct
  modified_base 18: mod_base = OTHER; note = thymine
  misc_feature 1..18: note = Antisense oligonucleotide
  modified_base 1: mod_base = OTHER; note = misc_feature - bicyclic nucleic acid scaffold modification
  modified_base 8: mod_base = OTHER; note = misc_feature - bicyclic nucleic acid scaffold modification
  modified_base 15: mod_base = OTHER; note = misc_feature - bicyclic nucleic acid scaffold modification
  modified_base 18: mod_base = OTHER; note = misc_feature - bicyclic nucleic acid scaffold modification
  source 1..18: mol_type = other RNA
atgttctgacaacagttt

SEQ ID NO: 4286 - RNA, 18 nt, synthetic construct
  modified_base 18: mod_base = OTHER; note = thymine
  misc_feature 1..18: note = Antisense oligonucleotide
  modified_base 1: mod_base = OTHER; note = misc_feature - bicyclic nucleic acid scaffold modification
  modified_base 3: mod_base = OTHER; note = misc_feature - bicyclic nucleic acid scaffold modification
  modified_base 8: mod_base = OTHER; note = misc_feature - bicyclic nucleic acid scaffold modification
  modified_base 18: mod_base = OTHER; note = misc_feature - bicyclic nucleic acid scaffold modification
  source 1..18: mol_type = other RNA
atgttctgacaacagttt

SEQ ID NO: 4287 - RNA, 18 nt, synthetic construct
  modified_base 18: mod_base = OTHER; note = thymine
  misc_feature 1..18: note = Antisense oligonucleotide
  modified_base 1: mod_base = OTHER; note = misc_feature - bicyclic nucleic acid scaffold modification
  modified_base 3: mod_base = OTHER; note = misc_feature - bicyclic nucleic acid scaffold modification
  modified_base 15: mod_base = OTHER; note = misc_feature - bicyclic nucleic acid scaffold modification
  modified_base 18: mod_base = OTHER; note = misc_feature - bicyclic nucleic acid scaffold modification
  source 1..18: mol_type = other RNA
atgttctgacaacagttt

SEQ ID NO: 4288 - RNA, 18 nt, synthetic construct
  modified_base 18: mod_base = OTHER; note = thymine
  misc_feature 1..18: note = Antisense oligonucleotide
  modified_base 1: mod_base = OTHER; note = misc_feature - bicyclic nucleic acid scaffold modification
  modified_base 13: mod_base = OTHER; note = misc_feature - bicyclic nucleic acid scaffold modification
  modified_base 18: mod_base = OTHER; note = misc_feature - bicyclic nucleic acid scaffold modification
  source 1..18: mol_type = other RNA
atgttctgacaacagttt

SEQ ID NO: 4289 - RNA, 18 nt, synthetic construct
  modified_base 18: mod_base = OTHER; note = thymine
  misc_feature 1..18: note = Antisense oligonucleotide
  modified_base 1: mod_base = OTHER; note = misc_feature - bicyclic nucleic acid scaffold modification
  modified_base 10: mod_base = OTHER; note = misc_feature - bicyclic nucleic acid scaffold modification
  modified_base 18: mod_base = OTHER; note = misc_feature - bicyclic nucleic acid scaffold modification
  source 1..18: mol_type = other RNA
atgttctgacaacagttt

SEQ ID NO: 4290 - RNA, 18 nt, synthetic construct
  modified_base 18: mod_base = OTHER; note = thymine
  misc_feature 1..18: note = Antisense oligonucleotide
  modified_base 1: mod_base = OTHER; note = misc_feature - bicyclic nucleic acid scaffold modification
  modified_base 6: mod_base = OTHER; note = misc_feature - bicyclic nucleic acid scaffold modification
  modified_base 18: mod_base = OTHER; note = misc_feature - bicyclic nucleic acid scaffold modification
  source 1..18: mol_type = other RNA
atgttctgacaacagttt

SEQ ID NO: 4291 - RNA, 18 nt, synthetic construct
  modified_base 18: mod_base = OTHER; note = thymine
  misc_feature 1..18: note = Antisense oligonucleotide
  modified_base 1: mod_base = OTHER; note = misc_feature - bicyclic nucleic acid scaffold modification
  modified_base 6: mod_base = OTHER; note = misc_feature - bicyclic nucleic acid scaffold modification
  modified_base 13: mod_base = OTHER; note = misc_feature - bicyclic nucleic acid scaffold modification
  modified_base 18: mod_base = OTHER; note = misc_feature - bicyclic nucleic acid scaffold modification
  source 1..18: mol_type = other RNA
atgttctgacaacagttt

SEQ ID NO: 4292 - RNA, 18 nt, synthetic construct
  modified_base 18: mod_base = OTHER; note = thymine
  misc_feature 1..18: note = Antisense oligonucleotide
  modified_base 1: mod_base = OTHER; note = misc_feature - bicyclic nucleic acid scaffold modification
  modified_base 6: mod_base = OTHER; note = misc_feature - bicyclic nucleic acid scaffold modification
  modified_base 10: mod_base = OTHER; note = misc_feature - bicyclic nucleic acid scaffold modification
  modified_base 18: mod_base = OTHER; note = misc_feature - bicyclic nucleic acid scaffold modification
  source 1..18: mol_type = other RNA
atgttctgacaacagttt

SEQ ID NO: 4293 - RNA, 18 nt, synthetic construct
  modified_base 2: mod_base = OTHER; note = thymine
  modified_base 17..18: mod_base = OTHER; note = thymine
  misc_feature 1..18: note = Antisense oligonucleotide
  modified_base 1..2: mod_base = OTHER; note = misc_feature - bicyclic nucleic acid scaffold modification
  modified_base 17..18: mod_base = OTHER; note = misc_feature - bicyclic nucleic acid scaffold modification
  source 1..18: mol_type = other RNA
atgttctgacaacagttt

SEQ ID NO: 4294 - RNA, 18 nt, synthetic construct
  modified_base 2: mod_base = OTHER; note = thymine
  modified_base 17..18: mod_base = OTHER; note = thymine
  misc_feature 1..18: note = Antisense oligonucleotide
  modified_base 1..2: mod_base = OTHER; note = misc_feature - bicyclic nucleic acid scaffold modification
  modified_base 8: mod_base = OTHER; note = misc_feature - bicyclic nucleic acid scaffold modification
  modified_base 17..18: mod_base = OTHER; note = misc_feature - bicyclic nucleic acid scaffold modification
  source 1..18: mol_type = other RNA
atgttctgacaacagttt

SEQ ID NO: 4295 - RNA, 18 nt, synthetic construct
  modified_base 2: mod_base = OTHER; note = thymine
  modified_base 17..18: mod_base = OTHER; note = thymine
  misc_feature 1..18: note = Antisense oligonucleotide
  modified_base 1..2: mod_base = OTHER; note = misc_feature - bicyclic nucleic acid scaffold modification
  modified_base 8: mod_base = OTHER; note = misc_feature - bicyclic nucleic acid scaffold modification
  modified_base 13: mod_base = OTHER; note = misc_feature - bicyclic nucleic acid scaffold modification
  modified_base 17..18: mod_base = OTHER; note = misc_feature - bicyclic nucleic acid scaffold modification
  source 1..18: mol_type = other RNA
atgttctgacaacagttt

SEQ ID NO: 4296 - RNA, 18 nt, synthetic construct
  modified_base 1: mod_base = OTHER; note = thymine
  misc_feature 1..18: note = Antisense oligonucleotide
  modified_base 1: mod_base = OTHER; note = misc_feature - bicyclic nucleic acid scaffold modification
  modified_base 18: mod_base = OTHER; note = misc_feature - bicyclic nucleic acid scaffold modification
  source 1..18: mol_type = other RNA
tgttctgacaacagtttg

SEQ ID NO: 4297 - RNA, 18 nt, synthetic construct
  modified_base 1: mod_base = OTHER; note = thymine
  misc_feature 1..18: note = Antisense oligonucleotide
  modified_base 1: mod_base = OTHER; note = misc_feature - bicyclic nucleic acid scaffold modification
  modified_base 18: mod_base = OTHER; note = misc_feature - bicyclic nucleic acid scaffold modification
  source 1..18: mol_type = other RNA
tgttctgacaacagtttg

SEQ ID NO: 4298 - RNA, 18 nt, synthetic construct
  modified_base 1: mod_base = OTHER; note = thymine
  misc_feature 1..18: note = Antisense oligonucleotide
  modified_base 1..2: mod_base = OTHER; note = misc_feature - bicyclic nucleic acid scaffold modification
  modified_base 18: mod_base = OTHER; note = misc_feature - bicyclic nucleic acid scaffold modification
  source 1..18: mol_type = other RNA
tgttctgacaacagtttg

SEQ ID NO: 4299 - RNA, 18 nt, synthetic construct
  modified_base 1: mod_base = OTHER; note = thymine
  misc_feature 1..18: note = Antisense oligonucleotide
  modified_base 1: mod_base = OTHER; note = misc_feature - bicyclic nucleic acid scaffold modification
  modified_base 7: mod_base = OTHER; note = misc_feature - bicyclic nucleic acid scaffold modification
  modified_base 18: mod_base = OTHER; note = misc_feature - bicyclic nucleic acid scaffold modification
  source 1..18: mol_type = other RNA
tgttctgacaacagtttg

SEQ ID NO: 4300 - RNA, 18 nt, synthetic construct
  modified_base 1: mod_base = OTHER; note = thymine
  misc_feature 1..18: note = Antisense oligonucleotide
  modified_base 1: mod_base = OTHER; note = misc_feature - bicyclic nucleic acid scaffold modification
  modified_base 14: mod_base = OTHER; note = misc_feature - bicyclic nucleic acid scaffold modification
  modified_base 18: mod_base = OTHER; note = misc_feature - bicyclic nucleic acid scaffold modification
  source 1..18: mol_type = other RNA
tgttctgacaacagtttg

SEQ ID NO: 4301 - RNA, 18 nt, synthetic construct
  modified_base 1: mod_base = OTHER; note = thymine
  misc_feature 1..18: note = Antisense oligonucleotide
  modified_base 1: mod_base = OTHER; note = misc_feature - bicyclic nucleic acid scaffold modification
  modified_base 7: mod_base = OTHER; note = misc_feature - bicyclic nucleic acid scaffold modification
  modified_base 14: mod_base = OTHER; note = misc_feature - bicyclic nucleic acid scaffold modification
  modified_base 18: mod_base = OTHER; note = misc_feature - bicyclic nucleic acid scaffold modification
  source 1..18: mol_type = other RNA
tgttctgacaacagtttg

SEQ ID NO: 4302 - RNA, 18 nt, synthetic construct
  modified_base 1: mod_base = OTHER; note = thymine
  misc_feature 1..18: note = Antisense oligonucleotide
  modified_base 1: mod_base = OTHER; note = misc_feature - bicyclic nucleic acid scaffold modification
  modified_base 5: mod_base = OTHER; note = misc_feature - bicyclic nucleic acid scaffold modification
  modified_base 18: mod_base = OTHER; note = misc_feature - bicyclic nucleic acid scaffold modification
  source 1..18: mol_type = other RNA
tgttctgacaacagtttg

SEQ ID NO: 4303 - RNA, 18 nt, synthetic construct
  modified_base 1: mod_base = OTHER; note = thymine
  misc_feature 1..18: note = Antisense oligonucleotide
  modified_base 1: mod_base = OTHER; note = misc_feature - bicyclic nucleic acid scaffold modification
  modified_base 9: mod_base = OTHER; note = misc_feature - bicyclic nucleic acid scaffold modification
  modified_base 18: mod_base = OTHER; note = misc_feature - bicyclic nucleic acid scaffold modification
  source 1..18: mol_type = other RNA
tgttctgacaacagtttg

SEQ ID NO: 4304 - RNA, 18 nt, synthetic construct
  modified_base 1: mod_base = OTHER; note = thymine
  misc_feature 1..18: note = Antisense oligonucleotide
  modified_base 1: mod_base = OTHER; note = misc_feature - bicyclic nucleic acid scaffold modification
  modified_base 12: mod_base = OTHER; note = misc_feature - bicyclic nucleic acid scaffold modification
  modified_base 18: mod_base = OTHER; note = misc_feature - bicyclic nucleic acid scaffold modification
  source 1..18: mol_type = other RNA
tgttctgacaacagtttg

SEQ ID NO: 4305 - RNA, 18 nt, synthetic construct
  modified_base 1: mod_base = OTHER; note = thymine
  misc_feature 1..18: note = Antisense oligonucleotide
  modified_base 1: mod_base = OTHER; note = misc_feature - bicyclic nucleic acid scaffold modification
  modified_base 5: mod_base = OTHER; note = misc_feature - bicyclic nucleic acid scaffold modification
  modified_base 12: mod_base = OTHER; note = misc_feature - bicyclic nucleic acid scaffold modification
  modified_base 18: mod_base = OTHER; note = misc_feature - bicyclic nucleic acid scaffold modification
  source 1..18: mol_type = other RNA
tgttctgacaacagtttg

SEQ ID NO: 4306 - RNA, 18 nt, synthetic construct
  modified_base 1: mod_base = OTHER; note = thymine
  modified_base 17: mod_base = OTHER; note = thymine
  misc_feature 1..18: note = Antisense oligonucleotide
  modified_base 1..2: mod_base = OTHER; note = misc_feature - bicyclic nucleic acid scaffold modification
  modified_base 17..18: mod_base = OTHER; note = misc_feature - bicyclic nucleic acid scaffold modification
  source 1..18: mol_type = other RNA
tgttctgacaacagtttg

SEQ ID NO: 4307 - RNA, 18 nt, synthetic construct
  modified_base 1: mod_base = OTHER; note = thymine
  modified_base 17: mod_base = OTHER; note = thymine
  misc_feature 1..18: note = Antisense oligonucleotide
  modified_base 1..2: mod_base = OTHER; note = misc_feature - bicyclic nucleic acid scaffold modification
  modified_base 7: mod_base = OTHER; note = misc_feature - bicyclic nucleic acid scaffold modification
  modified_base 17..18: mod_base = OTHER; note = misc_feature - bicyclic nucleic acid scaffold modification
  source 1..18: mol_type = other RNA
tgttctgacaacagtttg

SEQ ID NO: 4308 - RNA, 18 nt, synthetic construct
  modified_base 1: mod_base = OTHER; note = thymine
  modified_base 17: mod_base = OTHER; note = thymine
  misc_feature 1..18: note = Antisense oligonucleotide
  modified_base 1..2: mod_base = OTHER; note = misc_feature - bicyclic nucleic acid scaffold modification
  modified_base 7: mod_base = OTHER; note = misc_feature - bicyclic nucleic acid scaffold modification
  modified_base 12: mod_base = OTHER; note = misc_feature - bicyclic nucleic acid scaffold modification
  modified_base 17..18: mod_base = OTHER; note = misc_feature - bicyclic nucleic acid scaffold modification
  source 1..18: mol_type = other RNA
tgttctgacaacagtttg

SEQ ID NO: 4309 - RNA, 18 nt, synthetic construct
  misc_feature 1..18: note = Antisense oligonucleotide
  modified_base 1: mod_base = OTHER; note = misc_feature - bicyclic nucleic acid scaffold modification
  modified_base 18: mod_base = OTHER; note = misc_feature - bicyclic nucleic acid scaffold modification
  source 1..18: mol_type = other RNA
gttctgacaacagtttgc

SEQ ID NO: 4310 - RNA, 18 nt, synthetic construct
  misc_feature 1..18: note = Antisense oligonucleotide
  modified_base 1: mod_base = OTHER; note = misc_feature - bicyclic nucleic acid scaffold modification
  modified_base 4: mod_base = OTHER; note = misc_feature - bicyclic nucleic acid scaffold modification
  modified_base 18: mod_base = OTHER; note = misc_feature - bicyclic nucleic acid scaffold modification
  source 1..18: mol_type = other RNA
gttctgacaacagtttgc

SEQ ID NO: 4311 - RNA, 18 nt, synthetic construct
  misc_feature 1..18: note = Antisense oligonucleotide
  modified_base 1: mod_base = OTHER; note = misc_feature - bicyclic nucleic acid scaffold modification
  modified_base 8: mod_base = OTHER; note = misc_feature - bicyclic nucleic acid scaffold modification
  modified_base 18: mod_base = OTHER; note = misc_feature - bicyclic nucleic acid scaffold modification
  source 1..18: mol_type = other RNA
gttctgacaacagtttgc

SEQ ID NO: 4312 - RNA, 18 nt, synthetic construct
  misc_feature 1..18: note = Antisense oligonucleotide
  modified_base 1: mod_base = OTHER; note = misc_feature - bicyclic nucleic acid scaffold modification
  modified_base 11: mod_base = OTHER; note = misc_feature - bicyclic nucleic acid scaffold modification
  modified_base 18: mod_base = OTHER; note = misc_feature - bicyclic nucleic acid scaffold modification
  source 1..18: mol_type = other RNA
gttctgacaacagtttgc

SEQ ID NO: 4313 - RNA, 18 nt, synthetic construct
  misc_feature 1..18: note = Antisense oligonucleotide
  modified_base 1: mod_base = OTHER; note = misc_feature - bicyclic nucleic acid scaffold modification
  modified_base 4: mod_base = OTHER; note = misc_feature - bicyclic nucleic acid scaffold modification
  modified_base 11: mod_base = OTHER; note = misc_feature - bicyclic nucleic acid scaffold modification
  modified_base 18: mod_base = OTHER; note = misc_feature - bicyclic nucleic acid scaffold modification
  source 1..18: mol_type = other RNA
gttctgacaacagtttgc

SEQ ID NO: 4314 - RNA, 18 nt, synthetic construct
  misc_feature 1..18: note = Antisense oligonucleotide
  modified_base 1: mod_base = OTHER; note = misc_feature - bicyclic nucleic acid scaffold modification
  modified_base 4: mod_base = OTHER; note = misc_feature - bicyclic nucleic acid scaffold modification
  modified_base 8: mod_base = OTHER; note = misc_feature - bicyclic nucleic acid scaffold modification
  modified_base 18: mod_base = OTHER; note = misc_feature - bicyclic nucleic acid scaffold modification
  source 1..18: mol_type = other RNA
gttctgacaacagtttgc

SEQ ID NO: 4315 - RNA, 18 nt, synthetic construct
  misc_feature 1..18: note = Antisense oligonucleotide
  modified_base 1: mod_base = OTHER; note = misc_feature - bicyclic nucleic acid scaffold modification
  modified_base 13: mod_base = OTHER; note = misc_feature - bicyclic nucleic acid scaffold modification
  modified_base 18: mod_base = OTHER; note = misc_feature - bicyclic nucleic acid scaffold modification
  source 1..18: mol_type = other RNA
gttctgacaacagtttgc

SEQ ID NO: 4316 - RNA, 18 nt, synthetic construct
  misc_feature 1..18: note = Antisense oligonucleotide
  modified_base 1: mod_base = OTHER; note = misc_feature - bicyclic nucleic acid scaffold modification
  modified_base 6: mod_base = OTHER; note = misc_feature - bicyclic nucleic acid scaffold modification
  modified_base 18: mod_base = OTHER; note = misc_feature - bicyclic nucleic acid scaffold modification
  source 1..18: mol_type = other RNA
gttctgacaacagtttgc

SEQ ID NO: 4317 - RNA, 18 nt, synthetic construct
  misc_feature 1..18: note = Antisense oligonucleotide
  modified_base 1: mod_base = OTHER; note = misc_feature - bicyclic nucleic acid scaffold modification
  modified_base 6: mod_base = OTHER; note = misc_feature - bicyclic nucleic acid scaffold modification
  modified_base 13: mod_base = OTHER; note = misc_feature - bicyclic nucleic acid scaffold modification
  modified_base 18: mod_base = OTHER; note = misc_feature - bicyclic nucleic acid scaffold modification
  source 1..18: mol_type = other RNA
gttctgacaacagtttgc

SEQ ID NO: 4318 - RNA, 18 nt, synthetic construct
  modified_base 2: mod_base = OTHER; note = thymine
  misc_feature 1..18: note = Antisense oligonucleotide
  modified_base 1..2: mod_base = OTHER; note = misc_feature - bicyclic nucleic acid scaffold modification
  modified_base 6: mod_base = OTHER; note = misc_feature - bicyclic nucleic acid scaffold modification
  modified_base 13: mod_base = OTHER; note = misc_feature - bicyclic nucleic acid scaffold modification
  modified_base 17..18: mod_base = OTHER; note = misc_feature - bicyclic nucleic acid scaffold modification
  source 1..18: mol_type = other RNA
gttctgacaacagtttgc

SEQ ID NO: 4319 - RNA, 18 nt, synthetic construct
  modified_base 2: mod_base = OTHER; note = thymine
  misc_feature 1..18: note = Antisense oligonucleotide
  modified_base 1..2: mod_base = OTHER; note = misc_feature - bicyclic nucleic acid scaffold modification
  modified_base 8: mod_base = OTHER; note = misc_feature - bicyclic nucleic acid scaffold modification
  modified_base 11: mod_base = OTHER; note = misc_feature - bicyclic nucleic acid scaffold modification
  modified_base 17..18: mod_base = OTHER; note = misc_feature - bicyclic nucleic acid scaffold modification
  source 1..18: mol_type = other RNA
gttctgacaacagtttgc

SEQ ID NO: 4320 - RNA, 16 nt, synthetic construct
  misc_feature 1..16: note = Antisense oligonucleotide
  modified_base 1: mod_base = OTHER; note = misc_feature - bicyclic nucleic acid scaffold modification
  modified_base 16: mod_base = OTHER; note = misc_feature - bicyclic nucleic acid scaffold modification
  source 1..16: mol_type = other RNA
caatgttctgacaaca

SEQ ID NO: 4321 - RNA, 16 nt, synthetic construct
  misc_feature 1..16: note = Antisense oligonucleotide
  modified_base 1: mod_base = OTHER; note = misc_feature - bicyclic nucleic acid scaffold modification
  modified_base 5: mod_base = OTHER; note = misc_feature - bicyclic nucleic acid scaffold modification
  modified_base 16: mod_base = OTHER; note = misc_feature - bicyclic nucleic acid scaffold modification
  source 1..16: mol_type = other RNA
caatgttctgacaaca

SEQ ID NO: 4322 - RNA, 16 nt, synthetic construct
  misc_feature 1..16: note = Antisense oligonucleotide
  modified_base 1: mod_base = OTHER; note = misc_feature - bicyclic nucleic acid scaffold modification
  modified_base 10: mod_base = OTHER; note = misc_feature - bicyclic nucleic acid scaffold modification
  modified_base 16: mod_base = OTHER; note = misc_feature - bicyclic nucleic acid scaffold modification
  source 1..16: mol_type = other RNA
caatgttctgacaaca

SEQ ID NO: 4323 - RNA, 16 nt, synthetic construct
  misc_feature 1..16: note = Antisense oligonucleotide
  modified_base 1: mod_base = OTHER; note = misc_feature - bicyclic nucleic acid scaffold modification
  modified_base 5: mod_base = OTHER; note = misc_feature - bicyclic nucleic acid scaffold modification
  modified_base 10: mod_base = OTHER; note = misc_feature - bicyclic nucleic acid scaffold modification
  modified_base 16: mod_base = OTHER; note = misc_feature - bicyclic nucleic acid scaffold modification
  source 1..16: mol_type = other RNA
caatgttctgacaaca

SEQ ID NO: 4324 - RNA, 16 nt, synthetic construct
  misc_feature 1..16: note = Antisense oligonucleotide
  modified_base 1: mod_base = OTHER; note = misc_feature - bicyclic nucleic acid scaffold modification
  modified_base 12: mod_base = OTHER; note = misc_feature - bicyclic nucleic acid scaffold modification
  modified_base 16: mod_base = OTHER; note = misc_feature - bicyclic nucleic acid scaffold modification
  source 1..16: mol_type = other RNA
caatgttctgacaaca

SEQ ID NO: 4325 - RNA, 16 nt, synthetic construct
  misc_feature 1..16: note = Antisense oligonucleotide
  modified_base 1: mod_base = OTHER; note = misc_feature - bicyclic nucleic acid scaffold modification
  modified_base 8: mod_base = OTHER; note = misc_feature - bicyclic nucleic acid scaffold modification
  modified_base 16: mod_base = OTHER; note = misc_feature - bicyclic nucleic acid scaffold modification
  source 1..16: mol_type = other RNA
caatgttctgacaaca

SEQ ID NO: 4326 - RNA, 16 nt, synthetic construct
  misc_feature 1..16: note = Antisense oligonucleotide
  modified_base 1: mod_base = OTHER; note = misc_feature - bicyclic nucleic acid scaffold modification
  modified_base 8: mod_base = OTHER; note = misc_feature - bicyclic nucleic acid scaffold modification
  modified_base 12: mod_base = OTHER; note = misc_feature - bicyclic nucleic acid scaffold modification
  modified_base 16: mod_base = OTHER; note = misc_feature - bicyclic nucleic acid scaffold modification
  source 1..16: mol_type = other RNA
caatgttctgacaaca

SEQ ID NO: 4327 - RNA, 16 nt, synthetic construct
  misc_feature 1..16: note = Antisense oligonucleotide
  modified_base 1..2: mod_base = OTHER; note = misc_feature - bicyclic nucleic acid scaffold modification
  modified_base 15..16: mod_base = OTHER; note = misc_feature - bicyclic nucleic acid scaffold modification
  source 1..16: mol_type = other RNA
caatgttctgacaaca

SEQ ID NO: 4328 - RNA, 16 nt, synthetic construct
  misc_feature 1..16: note = Antisense oligonucleotide
  modified_base 1..2: mod_base = OTHER; note = misc_feature - bicyclic nucleic acid scaffold modification
  modified_base 8: mod_base = OTHER; note = misc_feature - bicyclic nucleic acid scaffold modification
  modified_base 15..16: mod_base = OTHER; note = misc_feature - bicyclic nucleic acid scaffold modification
  source 1..16: mol_type = other RNA
caatgttctgacaaca

SEQ ID NO: 4329 - RNA, 16 nt, synthetic construct
  misc_feature 1..16: note = Antisense oligonucleotide
  modified_base 1..2: mod_base = OTHER; note = misc_feature - bicyclic nucleic acid scaffold modification
  modified_base 5: mod_base = OTHER; note = misc_feature - bicyclic nucleic acid scaffold modification
  modified_base 10: mod_base = OTHER; note = misc_feature - bicyclic nucleic acid scaffold modification
  modified_base 15..16: mod_base = OTHER; note = misc_feature - bicyclic nucleic acid scaffold modification
  source 1..16: mol_type = other RNA
caatgttctgacaaca

SEQ ID NO: 4330 - RNA, 16 nt, synthetic construct
  misc_feature 1..16: note = Antisense oligonucleotide
  modified_base 1: mod_base = OTHER; note = misc_feature - bicyclic nucleic acid scaffold modification
  modified_base 16: mod_base = OTHER; note = misc_feature - bicyclic nucleic acid scaffold modification
  source 1..16: mol_type = other RNA
aatgttctgacaacag

SEQ ID NO: 4331 - RNA, 16 nt, synthetic construct
  misc_feature 1..16: note = Antisense oligonucleotide
  modified_base 1: mod_base = OTHER; note = misc_feature - bicyclic nucleic acid scaffold modification
  modified_base 4: mod_base = OTHER; note = misc_feature - bicyclic nucleic acid scaffold modification
  modified_base 16: mod_base = OTHER; note = misc_feature - bicyclic nucleic acid scaffold modification
  source 1..16: mol_type = other RNA
aatgttctgacaacag

SEQ ID NO: 4332 - RNA, 16 nt, synthetic construct
  misc_feature 1..16: note = Antisense oligonucleotide
  modified_base 1: mod_base = OTHER; note = misc_feature - bicyclic nucleic acid scaffold modification
  modified_base 9: mod_base = OTHER; note = misc_feature - bicyclic nucleic acid scaffold modification
  modified_base 16: mod_base = OTHER; note = misc_feature - bicyclic nucleic acid scaffold modification
  source 1..16: mol_type = other RNA
aatgttctgacaacag

SEQ ID NO: 4333 - RNA, 16 nt, synthetic construct
  misc_feature 1..16: note = Antisense oligonucleotide
  modified_base 1: mod_base = OTHER; note = misc_feature - bicyclic nucleic acid scaffold modification
  modified_base 4: mod_base = OTHER; note = misc_feature - bicyclic nucleic acid scaffold modification
  modified_base 9: mod_base = OTHER; note = misc_feature - bicyclic nucleic acid scaffold modification
  modified_base 16: mod_base = OTHER; note = misc_feature - bicyclic nucleic acid scaffold modification
  source 1..16: mol_type = other RNA
aatgttctgacaacag

SEQ ID NO: 4334 - RNA, 16 nt, synthetic construct
  misc_feature 1..16: note = Antisense oligonucleotide
  modified_base 1: mod_base = OTHER; note = misc_feature - bicyclic nucleic acid scaffold modification
  modified_base 14: mod_base = OTHER; note = misc_feature - bicyclic nucleic acid scaffold modification
  modified_base 16: mod_base = OTHER; note = misc_feature - bicyclic nucleic acid scaffold modification
  source 1..16: mol_type = other RNA
aatgttctgacaacag

SEQ ID NO: 4335 - RNA, 16 nt, synthetic construct
  misc_feature 1..16: note = Antisense oligonucleotide
  modified_base 1: mod_base = OTHER; note = misc_feature - bicyclic nucleic acid scaffold modification
  modified_base 11: mod_base = OTHER; note = misc_feature - bicyclic nucleic acid scaffold modification
  modified_base 16: mod_base = OTHER; note = misc_feature - bicyclic nucleic acid scaffold modification
  source 1..16: mol_type = other RNA
aatgttctgacaacag

SEQ ID NO: 4336 - RNA, 16 nt, synthetic construct
  misc_feature 1..16: note = Antisense oligonucleotide
  modified_base 1: mod_base = OTHER; note = misc_feature - bicyclic nucleic acid scaffold modification
  modified_base 7: mod_base = OTHER; note = misc_feature - bicyclic nucleic acid scaffold modification
  modified_base 16: mod_base = OTHER; note = misc_feature - bicyclic nucleic acid scaffold modification
  source 1..16: mol_type = other RNA
aatgttctgacaacag

SEQ ID NO: 4337 - RNA, 16 nt, synthetic construct
  misc_feature 1..16: note = Antisense oligonucleotide
  modified_base 1: mod_base = OTHER; note = misc_feature - bicyclic nucleic acid scaffold modification
  modified_base 7: mod_base = OTHER; note = misc_feature - bicyclic nucleic acid scaffold modification
  modified_base 14: mod_base = OTHER; note = misc_feature - bicyclic nucleic acid scaffold modification
  modified_base 16: mod_base = OTHER; note = misc_feature - bicyclic nucleic acid scaffold modification
  source 1..16: mol_type = other RNA
aatgttctgacaacag

SEQ ID NO: 4338 - RNA, 16 nt, synthetic construct
  misc_feature 1..16: note = Antisense oligonucleotide
  modified_base 1: mod_base = OTHER; note = misc_feature - bicyclic nucleic acid scaffold modification
  modified_base 4: mod_base = OTHER; note = misc_feature - bicyclic nucleic acid scaffold modification
  modified_base 11: mod_base = OTHER; note = misc_feature - bicyclic nucleic acid scaffold modification
  modified_base 16: mod_base = OTHER; note = misc_feature - bicyclic nucleic acid scaffold modification
  source 1..16: mol_type = other RNA
aatgttctgacaacag

SEQ ID NO: 4339 - RNA, 16 nt, synthetic construct
  misc_feature 1..16: note = Antisense oligonucleotide
  modified_base 1..2: mod_base = OTHER; note = misc_feature - bicyclic nucleic acid scaffold modification
  modified_base 9: mod_base = OTHER; note = misc_feature - bicyclic nucleic acid scaffold modification
  modified_base 15..16: mod_base = OTHER; note = misc_feature - bicyclic nucleic acid scaffold modification
  source 1..16: mol_type = other RNA
aatgttctgacaacag

SEQ ID NO: 4340 - RNA, 16 nt, synthetic construct
  misc_feature 1..16: note = Antisense oligonucleotide
  modified_base 1..2: mod_base = OTHER; note = misc_feature - bicyclic nucleic acid scaffold modification
  modified_base 15..16: mod_base = OTHER; note = misc_feature - bicyclic nucleic acid scaffold modification
  source 1..16: mol_type = other RNA
aatgttctgacaacag

SEQ ID NO: 4341 - RNA, 16 nt, synthetic construct
  misc_feature 1..16: note = Antisense oligonucleotide
  modified_base 1..2: mod_base = OTHER; note = misc_feature - bicyclic nucleic acid scaffold modification
  modified_base 7: mod_base = OTHER; note = misc_feature - bicyclic nucleic acid scaffold modification
  modified_base 11: mod_base = OTHER; note = misc_feature - bicyclic nucleic acid scaffold modification
  modified_base 15..16: mod_base = OTHER; note = misc_feature - bicyclic nucleic acid scaffold modification
  source 1..16: mol_type = other RNA
aatgttctgacaacag

SEQ ID NO: 4342 - RNA, 16 nt, synthetic construct
  modified_base 16: mod_base = OTHER; note = thymine
  misc_feature 1..16: note = Antisense oligonucleotide
  modified_base 1: mod_base = OTHER; note = misc_feature - bicyclic nucleic acid scaffold modification
  modified_base 16: mod_base = OTHER; note = misc_feature - bicyclic nucleic acid scaffold modification
  source 1..16: mol_type = other RNA
atgttctgacaacagt

SEQ ID NO: 4343 - RNA, 16 nt, synthetic construct
  modified_base 16: mod_base = OTHER; note = thymine
  misc_feature 1..16: note = Antisense oligonucleotide
  modified_base 1: mod_base = OTHER; note = misc_feature - bicyclic nucleic acid scaffold modification
  modified_base 3: mod_base = OTHER; note = misc_feature - bicyclic nucleic acid scaffold modification
  modified_base 16: mod_base = OTHER; note = misc_feature - bicyclic nucleic acid scaffold modification
  source 1..16: mol_type = other RNA
atgttctgacaacagt

SEQ ID NO: 4344 - RNA, 16 nt, synthetic construct
  modified_base 16: mod_base = OTHER; note = thymine
  misc_feature 1..16: note = Antisense oligonucleotide
  modified_base 1: mod_base = OTHER; note = misc_feature - bicyclic nucleic acid scaffold modification
  modified_base 8: mod_base = OTHER; note = misc_feature - bicyclic nucleic acid scaffold modification
  modified_base 16: mod_base = OTHER; note = misc_feature - bicyclic nucleic acid scaffold modification
  source 1..16: mol_type = other RNA
atgttctgacaacagt

SEQ ID NO: 4345 - RNA, 16 nt, synthetic construct
  modified_base 16: mod_base = OTHER; note = thymine
  misc_feature 1..16: note = Antisense oligonucleotide
  modified_base 1: mod_base = OTHER; note = misc_feature - bicyclic nucleic acid scaffold modification
  modified_base 3: mod_base = OTHER; note = misc_feature - bicyclic nucleic acid scaffold modification
  modified_base 8: mod_base = OTHER; note = misc_feature - bicyclic nucleic acid scaffold modification
  modified_base 16: mod_base = OTHER; note = misc_feature - bicyclic nucleic acid scaffold modification
  source 1..16: mol_type = other RNA
atgttctgacaacagt

SEQ ID NO: 4346 - RNA, 16 nt, synthetic construct
  modified_base 16: mod_base = OTHER; note = thymine
  misc_feature 1..16: note = Antisense oligonucleotide
  modified_base 1: mod_base = OTHER; note = misc_feature - bicyclic nucleic acid scaffold modification
  modified_base 13: mod_base = OTHER; note = misc_feature - bicyclic nucleic acid scaffold modification
  modified_base 16: mod_base = OTHER; note = misc_feature - bicyclic nucleic acid scaffold modification
  source 1..16: mol_type = other RNA
atgttctgacaacagt

SEQ ID NO: 4347 - RNA, 16 nt, synthetic construct
  modified_base 16: mod_base = OTHER; note = thymine
  misc_feature 1..16: note = Antisense oligonucleotide
  modified_base 1: mod_base = OTHER; note = misc_feature - bicyclic nucleic acid scaffold modification
  modified_base 10: mod_base = OTHER; note = misc_feature - bicyclic nucleic acid scaffold modification
  modified_base 16: mod_base = OTHER; note = misc_feature - bicyclic nucleic acid scaffold modification
  source 1..16: mol_type = other RNA
atgttctgacaacagt

SEQ ID NO: 4348 - RNA, 16 nt, synthetic construct
  modified_base 16: mod_base = OTHER; note = thymine
  misc_feature 1..16: note = Antisense oligonucleotide
  modified_base 1: mod_base = OTHER; note = misc_feature - bicyclic nucleic acid scaffold modification
  modified_base 6: mod_base = OTHER; note = misc_feature - bicyclic nucleic acid scaffold modification
  modified_base 16: mod_base = OTHER; note = misc_feature - bicyclic nucleic acid scaffold modification
  source 1..16: mol_type = other RNA
atgttctgacaacagt

SEQ ID NO: 4349 - RNA, 16 nt, synthetic construct
  modified_base 16: mod_base = OTHER; note = thymine
  misc_feature 1..16: note = Antisense oligonucleotide
  modified_base 1: mod_base = OTHER; note = misc_feature - bicyclic nucleic acid scaffold modification
  modified_base 6: mod_base = OTHER; note = misc_feature - bicyclic nucleic acid scaffold modification
  modified_base 13: mod_base = OTHER; note = misc_feature - bicyclic nucleic acid scaffold modification
  modified_base 16: mod_base = OTHER; note = misc_feature - bicyclic nucleic acid scaffold modification
  source 1..16: mol_type = other RNA
atgttctgacaacagt

SEQ ID NO: 4350 - RNA, 16 nt, synthetic construct
  modified_base 2: mod_base = OTHER; note = thymine
  modified_base 16: mod_base = OTHER; note = thymine
  misc_feature 1..16: note = Antisense oligonucleotide
  modified_base 1..2: mod_base = OTHER; note = misc_feature - bicyclic nucleic acid scaffold modification
  modified_base 6: mod_base = OTHER; note = misc_feature - bicyclic nucleic acid scaffold modification
  modified_base 10: mod_base = OTHER; note = misc_feature - bicyclic nucleic acid scaffold modification
  modified_base 15..16: mod_base = OTHER; note = misc_feature - bicyclic nucleic acid scaffold modification
  source 1..16: mol_type = other RNA
atgttctgacaacagt

SEQ ID NO: 4351 - RNA, 16 nt, synthetic construct
  modified_base 2: mod_base = OTHER; note = thymine
  modified_base 16: mod_base = OTHER; note = thymine
  misc_feature 1..16: note = Antisense oligonucleotide
  modified_base 1..2: mod_base = OTHER; note = misc_feature - bicyclic nucleic acid scaffold modification
  modified_base 8: mod_base = OTHER; note = misc_feature - bicyclic nucleic acid scaffold modification
  modified_base 15..16: mod_base = OTHER; note = misc_feature - bicyclic nucleic acid scaffold modification
  source 1..16: mol_type = other RNA
atgttctgacaacagt

SEQ ID NO: 4352 - RNA, 16 nt, synthetic construct
  modified_base 2: mod_base = OTHER; note = thymine
  modified_base 16: mod_base = OTHER; note = thymine
  misc_feature 1..16: note = Antisense oligonucleotide
  modified_base 1..2: mod_base = OTHER; note = misc_feature - bicyclic nucleic acid scaffold modification
  modified_base 15..16: mod_base = OTHER; note = misc_feature - bicyclic nucleic acid scaffold modification
  source 1..16: mol_type = other RNA
atgttctgacaacagt

SEQ ID NO: 4353 - RNA, 16 nt, synthetic construct
  modified_base 1: mod_base = OTHER; note = thymine
  modified_base 16: mod_base = OTHER; note = thymine
  misc_feature 1..16: note = Antisense oligonucleotide
  modified_base 1: mod_base = OTHER; note = misc_feature - bicyclic nucleic acid scaffold modification
  modified_base 16: mod_base = OTHER; note = misc_feature - bicyclic nucleic acid scaffold modification
  source 1..16: mol_type = other RNA
tgttctgacaacagtt

SEQ ID NO: 4354 - RNA, 16 nt, synthetic construct
  modified_base 1: mod_base = OTHER; note = thymine
  modified_base 16: mod_base = OTHER; note = thymine
  misc_feature 1..16: note = Antisense oligonucleotide
  modified_base 1..2: mod_base = OTHER; note = misc_feature - bicyclic nucleic acid scaffold modification
  modified_base 16: mod_base = OTHER; note = misc_feature - bicyclic nucleic acid scaffold modification
  source 1..16: mol_type = other RNA
tgttctgacaacagtt

SEQ ID NO: 4355 - RNA, 16 nt, synthetic construct
  modified_base 1: mod_base = OTHER; note = thymine
  modified_base 16: mod_base = OTHER; note = thymine
  misc_feature 1..16: note = Antisense oligonucleotide
  modified_base 1: mod_base = OTHER; note = misc_feature - bicyclic nucleic acid scaffold modification
  modified_base 7: mod_base = OTHER; note = misc_feature - bicyclic nucleic acid scaffold modification
  modified_base 16: mod_base = OTHER; note = misc_feature - bicyclic nucleic acid scaffold modification
  source 1..16: mol_type = other RNA
tgttctgacaacagtt

SEQ ID NO: 4356 - RNA, 16 nt, synthetic construct
  modified_base 1: mod_base = OTHER; note = thymine
  modified_base 16: mod_base = OTHER; note = thymine
  misc_feature 1..16: note = Antisense oligonucleotide
  modified_base 1: mod_base = OTHER; note = misc_feature - bicyclic nucleic acid scaffold modification
  modified_base 14: mod_base = OTHER; note = misc_feature - bicyclic nucleic acid scaffold modification
  modified_base 16: mod_base = OTHER; note = misc_feature - bicyclic nucleic acid scaffold modification
  source 1..16: mol_type = other RNA
tgttctgacaacagtt

SEQ ID NO: 4357 - RNA, 16 nt, synthetic construct
  modified_base 1: mod_base = OTHER; note = thymine
  modified_base 16: mod_base = OTHER; note = thymine
  misc_feature 1..16: note = Antisense oligonucleotide
  modified_base 1: mod_base = OTHER; note = misc_feature - bicyclic nucleic acid scaffold modification
  modified_base 7: mod_base = OTHER; note = misc_feature - bicyclic nucleic acid scaffold modification
  modified_base 14: mod_base = OTHER; note = misc_feature - bicyclic nucleic acid scaffold modification
  modified_base 16: mod_base = OTHER; note = misc_feature - bicyclic nucleic acid scaffold modification
  source 1..16: mol_type = other RNA
tgttctgacaacagtt

SEQ ID NO: 4358 - RNA, 16 nt, synthetic construct
  modified_base 1: mod_base = OTHER; note = thymine
  modified_base 16: mod_base = OTHER; note = thymine
  misc_feature 1..16: note = Antisense oligonucleotide
  modified_base 1: mod_base = OTHER; note = misc_feature - bicyclic nucleic acid scaffold modification
  modified_base 12: mod_base = OTHER; note = misc_feature - bicyclic nucleic acid scaffold modification
  modified_base 16: mod_base = OTHER; note = misc_feature - bicyclic nucleic acid scaffold modification
  source 1..16: mol_type = other RNA
tgttctgacaacagtt

SEQ ID NO: 4359 - RNA, 16 nt, synthetic construct
  modified_base 1: mod_base = OTHER; note = thymine
  modified_base 16: mod_base = OTHER; note = thymine
  misc_feature 1..16: note = Antisense oligonucleotide
  modified_base 1: mod_base = OTHER; note = misc_feature - bicyclic nucleic acid scaffold modification
  modified_base 9: mod_base = OTHER; note = misc_feature - bicyclic nucleic acid scaffold modification
  modified_base 16: mod_base = OTHER; note = misc_feature - bicyclic nucleic acid scaffold modification
  source 1..16: mol_type = other RNA
tgttctgacaacagtt

SEQ ID NO: 4360 - RNA, 16 nt, synthetic construct
  modified_base 1: mod_base = OTHER; note = thymine
  modified_base 16: mod_base = OTHER; note = thymine
  misc_feature 1..16: note = Antisense oligonucleotide
  modified_base 1: mod_base = OTHER; note = misc_feature - bicyclic nucleic acid scaffold modification
  modified_base 5: mod_base = OTHER; note = misc_feature - bicyclic nucleic acid scaffold modification
  modified_base 16: mod_base = OTHER; note = misc_feature - bicyclic nucleic acid scaffold modification
  source 1..16: mol_type = other RNA
tgttctgacaacagtt

SEQ ID NO: 4361 - RNA, 16 nt, synthetic construct
  modified_base 1: mod_base = OTHER; note = thymine
  modified_base 16: mod_base = OTHER; note = thymine
  misc_feature 1..16: note = Antisense oligonucleotide
  modified_base 1: mod_base = OTHER; note = misc_feature - bicyclic nucleic acid scaffold modification
  modified_base 5: mod_base = OTHER; note = misc_feature - bicyclic nucleic acid scaffold modification
  modified_base 12: mod_base = OTHER; note = misc_feature - bicyclic nucleic acid scaffold modification
  modified_base 16: mod_base = OTHER; note = misc_feature - bicyclic nucleic acid scaffold modification
  source 1..16: mol_type = other RNA
tgttctgacaacagtt

SEQ ID NO: 4362 - RNA, 16 nt, synthetic construct
  modified_base 1: mod_base = OTHER; note = thymine
  modified_base 16: mod_base = OTHER; note = thymine
  misc_feature 1..16: note = Antisense oligonucleotide
  modified_base 1: mod_base = OTHER; note = misc_feature - bicyclic nucleic acid scaffold modification
  modified_base 5: mod_base = OTHER; note = misc_feature - bicyclic nucleic acid scaffold modification
  modified_base 9: mod_base = OTHER; note = misc_feature - bicyclic nucleic acid scaffold modification
  modified_base 16: mod_base = OTHER; note = misc_feature - bicyclic nucleic acid scaffold modification
  source 1..16: mol_type = other RNA
tgttctgacaacagtt

SEQ ID NO: 4363 - RNA, 16 nt, synthetic construct
  modified_base 1: mod_base = OTHER; note = thymine
  modified_base 15..16: mod_base = OTHER; note = thymine
  misc_feature 1..16: note = Antisense oligonucleotide
  modified_base 1..2: mod_base = OTHER; note = misc_feature - bicyclic nucleic acid scaffold modification
  modified_base 15..16: mod_base = OTHER; note = misc_feature - bicyclic nucleic acid scaffold modification
  source 1..16: mol_type = other RNA
tgttctgacaacagtt

SEQ ID NO: 4364 - RNA, 16 nt, synthetic construct
  modified_base 1: mod_base = OTHER; note = thymine
  modified_base 15..16: mod_base = OTHER; note = thymine
  misc_feature 1..16: note = Antisense oligonucleotide
  modified_base 1..2: mod_base = OTHER; note = misc_feature - bicyclic nucleic acid scaffold modification
  modified_base 7: mod_base = OTHER; note = misc_feature - bicyclic nucleic acid scaffold modification
  modified_base 15..16: mod_base = OTHER; note = misc_feature - bicyclic nucleic acid scaffold modification
  source 1..16: mol_type = other RNA
tgttctgacaacagtt

SEQ ID NO: 4365 - RNA, 16 nt, synthetic construct
  modified_base 1: mod_base = OTHER; note = thymine
  modified_base 15..16: mod_base = OTHER; note = thymine
  misc_feature 1..16: note = Antisense oligonucleotide
  modified_base 1..2: mod_base = OTHER; note = misc_feature - bicyclic nucleic acid scaffold modification
  modified_base 5: mod_base = OTHER; note = misc_feature - bicyclic nucleic acid scaffold modification
  modified_base 12: mod_base = OTHER; note = misc_feature - bicyclic nucleic acid scaffold modification
  modified_base 15..16: mod_base = OTHER; note = misc_feature - bicyclic nucleic acid scaffold modification
  source 1..16: mol_type = other RNA
tgttctgacaacagtt

SEQ ID NO: 4366 - RNA, 16 nt, synthetic construct
  modified_base 16: mod_base = OTHER; note = thymine
  misc_feature 1..16: note = Antisense oligonucleotide
  modified_base 1: mod_base = OTHER; note = misc_feature - bicyclic nucleic acid scaffold modification
  modified_base 16: mod_base = OTHER; note = misc_feature - bicyclic nucleic acid scaffold modification
  source 1..16: mol_type = other RNA
gttctgacaacagttt

SEQ ID NO: 4367 - RNA, 16 nt, synthetic construct
  modified_base 16: mod_base = OTHER; note = thymine
  misc_feature 1..16: note = Antisense oligonucleotide
  modified_base 1: mod_base = OTHER; note = misc_feature - bicyclic nucleic acid scaffold modification
  modified_base 6: mod_base = OTHER; note = misc_feature - bicyclic nucleic acid scaffold modification
  modified_base 16: mod_base = OTHER; note = misc_feature - bicyclic nucleic acid scaffold modification
  source 1..16: mol_type = other RNA
gttctgacaacagttt

SEQ ID NO: 4368 - RNA, 16 nt, synthetic construct
  modified_base 16: mod_base = OTHER; note = thymine
  misc_feature 1..16: note = Antisense oligonucleotide
  modified_base 1: mod_base = OTHER; note = misc_feature - bicyclic nucleic acid scaffold modification
  modified_base 13: mod_base = OTHER; note = misc_feature - bicyclic nucleic acid scaffold modification
  modified_base 16: mod_base = OTHER; note = misc_feature - bicyclic nucleic acid scaffold modification
  source 1..16: mol_type = other RNA
gttctgacaacagttt

SEQ ID NO: 4369 - RNA, 16 nt, synthetic construct
  modified_base 16: mod_base = OTHER; note = thymine
  misc_feature 1..16: note = Antisense oligonucleotide
  modified_base 1: mod_base = OTHER; note = misc_feature - bicyclic nucleic acid scaffold modification
  modified_base 6: mod_base = OTHER; note = misc_feature - bicyclic nucleic acid scaffold modification
  modified_base 13: mod_base = OTHER; note = misc_feature - bicyclic nucleic acid scaffold modification
  modified_base 16: mod_base = OTHER; note = misc_feature - bicyclic nucleic acid scaffold modification
  source 1..16: mol_type = other RNA
gttctgacaacagttt

SEQ ID NO: 4370 - RNA, 16 nt, synthetic construct
  modified_base 16: mod_base = OTHER; note = thymine
  misc_feature 1..16: note = Antisense oligonucleotide
  modified_base 1: mod_base = OTHER; note = misc_feature - bicyclic nucleic acid scaffold modification
  modified_base 4: mod_base = OTHER; note = misc_feature - bicyclic nucleic acid scaffold modification
  modified_base 16: mod_base = OTHER; note = misc_feature - bicyclic nucleic acid scaffold modification
  source 1..16: mol_type = other RNA
gttctgacaacagttt

SEQ ID NO: 4371 - RNA, 16 nt, synthetic construct
  modified_base 16: mod_base = OTHER; note = thymine
  misc_feature 1..16: note = Antisense oligonucleotide
  modified_base 1: mod_base = OTHER; note = misc_feature - bicyclic nucleic acid scaffold modification
  modified_base 8: mod_base = OTHER; note = misc_feature - bicyclic nucleic acid scaffold modification
  modified_base 16: mod_base = OTHER; note = misc_feature - bicyclic nucleic acid scaffold modification
  source 1..16: mol_type = other RNA
gttctgacaacagttt

SEQ ID NO: 4372 - RNA, 16 nt, synthetic construct
  modified_base 16: mod_base = OTHER; note = thymine
  misc_feature 1..16: note = Antisense oligonucleotide
  modified_base 1: mod_base = OTHER; note = misc_feature - bicyclic nucleic acid scaffold modification
  modified_base 11: mod_base = OTHER; note = misc_feature - bicyclic nucleic acid scaffold modification
  modified_base 16: mod_base = OTHER; note = misc_feature - bicyclic nucleic acid scaffold modification
  source 1..16: mol_type = other RNA
gttctgacaacagttt

SEQ ID NO: 4373 - RNA, 16 nt, synthetic construct
  modified_base 16: mod_base = OTHER; note = thymine
  misc_feature 1..16: note = Antisense oligonucleotide
  modified_base 1: mod_base = OTHER; note = misc_feature - bicyclic nucleic acid scaffold modification
  modified_base 11: mod_base = OTHER; note = misc_feature - bicyclic nucleic acid scaffold modification
  modified_base 16: mod_base = OTHER; note = misc_feature - bicyclic nucleic acid scaffold modification
  source 1..16: mol_type = other RNA
gttctgacaacagttt

SEQ ID NO: 4374 - RNA, 16 nt, synthetic construct
  modified_base 2: mod_base = OTHER; note = thymine
  modified_base 15..16: mod_base = OTHER; note = thymine
  misc_feature 1..16: note = Antisense oligonucleotide
  modified_base 1..2: mod_base = OTHER; note = misc_feature - bicyclic nucleic acid scaffold modification
  modified_base 15..16: mod_base = OTHER; note = misc_feature - bicyclic nucleic acid scaffold modification
  source 1..16: mol_type = other RNA
gttctgacaacagttt

SEQ ID NO: 4375 - RNA, 16 nt, synthetic construct
  modified_base 2: mod_base = OTHER; note = thymine
  modified_base 15..16: mod_base = OTHER; note = thymine
  misc_feature 1..16: note = Antisense oligonucleotide
  modified_base 1..2: mod_base = OTHER; note = misc_feature - bicyclic nucleic acid scaffold modification
  modified_base 8: mod_base = OTHER; note = misc_feature - bicyclic nucleic acid scaffold modification
  modified_base 15..16: mod_base = OTHER; note = misc_feature - bicyclic nucleic acid scaffold modification
  source 1..16: mol_type = other RNA
gttctgacaacagttt

SEQ ID NO: 4376 - RNA, 16 nt, synthetic construct
  modified_base 2: mod_base = OTHER; note = thymine
  modified_base 15..16: mod_base = OTHER; note = thymine
  misc_feature 1..16: note = Antisense oligonucleotide
  modified_base 1..2: mod_base = OTHER; note = misc_feature - bicyclic nucleic acid scaffold modification
  modified_base 6: mod_base = OTHER; note = misc_feature - bicyclic nucleic acid scaffold modification
  modified_base 13: mod_base = OTHER; note = misc_feature - bicyclic nucleic acid scaffold modification
  modified_base 15..16: mod_base = OTHER; note = misc_feature - bicyclic nucleic acid scaffold modification
  source 1..16: mol_type = other RNA
gttctgacaacagttt

SEQ ID NO: 4377 - RNA, 16 nt, synthetic construct
  modified_base 1: mod_base = OTHER; note = thymine
  misc_feature 1..16: note = Antisense oligonucleotide
  modified_base 1: mod_base = OTHER; note = misc_feature - bicyclic nucleic acid scaffold modification
  modified_base 16: mod_base = OTHER; note = misc_feature - bicyclic nucleic acid scaffold modification
  source 1..16: mol_type = other RNA
ttctgacaacagtttg

SEQ ID NO: 4378 - RNA, 16 nt, synthetic construct
  modified_base 1: mod_base = OTHER; note = thymine
  misc_feature 1..16: note = Antisense oligonucleotide
  modified_base 1: mod_base = OTHER; note = misc_feature - bicyclic nucleic acid scaffold modification
  modified_base 5: mod_base = OTHER; note = misc_feature - bicyclic nucleic acid scaffold modification
  modified_base 16: mod_base = OTHER; note = misc_feature - bicyclic nucleic acid scaffold modification
  source 1..16: mol_type = other RNA
ttctgacaacagtttg

SEQ ID NO: 4379 - RNA, 16 nt, synthetic construct
  modified_base 1: mod_base = OTHER; note = thymine
  misc_feature 1..16: note = Antisense oligonucleotide
  modified_base 1: mod_base = OTHER; note = misc_feature - bicyclic nucleic acid scaffold modification
  modified_base 12: mod_base = OTHER; note = misc_feature - bicyclic nucleic acid scaffold modification
  modified_base 16: mod_base = OTHER; note = misc_feature - bicyclic nucleic acid scaffold modification
  source 1..16: mol_type = other RNA
ttctgacaacagtttg

SEQ ID NO: 4380 - RNA, 16 nt, synthetic construct
  modified_base 1: mod_base = OTHER; note = thymine
  misc_feature 1..16: note = Antisense oligonucleotide
  modified_base 1: mod_base = OTHER; note = misc_feature - bicyclic nucleic acid scaffold modification
  modified_base 5: mod_base = OTHER; note = misc_feature - bicyclic nucleic acid scaffold modification
  modified_base 12: mod_base = OTHER; note = misc_feature - bicyclic nucleic acid scaffold modification
  modified_base 16: mod_base = OTHER; note = misc_feature - bicyclic nucleic acid scaffold modification
  source 1..16: mol_type = other RNA
ttctgacaacagtttg

SEQ ID NO: 4381 - RNA, 16 nt, synthetic construct
  modified_base 1: mod_base = OTHER; note = thymine
  misc_feature 1..16: note = Antisense oligonucleotide
  modified_base 1: mod_base = OTHER; note = misc_feature - bicyclic nucleic acid scaffold modification
  modified_base 10: mod_base = OTHER; note = misc_feature - bicyclic nucleic acid scaffold modification
  modified_base 16: mod_base = OTHER; note = misc_feature - bicyclic nucleic acid scaffold modification
  source 1..16: mol_type = other RNA
ttctgacaacagtttg

SEQ ID NO: 4382 - RNA, 16 nt, synthetic construct
  modified_base 1: mod_base = OTHER; note = thymine
  misc_feature 1..16: note = Antisense oligonucleotide
  modified_base 1: mod_base = OTHER; note = misc_feature - bicyclic nucleic acid scaffold modification
  modified_base 7: mod_base = OTHER; note = misc_feature - bicyclic nucleic acid scaffold modification
  modified_base 16: mod_base = OTHER; note = misc_feature - bicyclic nucleic acid scaffold modification
  source 1..16: mol_type = other RNA
ttctgacaacagtttg

SEQ ID NO: 4383 - RNA, 16 nt, synthetic construct
  modified_base 1: mod_base = OTHER; note = thymine
  misc_feature 1..16: note = Antisense oligonucleotide
  modified_base 1: mod_base = OTHER; note = misc_feature - bicyclic nucleic acid scaffold modification
  modified_base 3: mod_base = OTHER; note = misc_feature - bicyclic nucleic acid scaffold modification
  modified_base 16: mod_base = OTHER; note = misc_feature - bicyclic nucleic acid scaffold modification
  source 1..16: mol_type = other RNA
ttctgacaacagtttg

SEQ ID NO: 4384 - RNA, 16 nt, synthetic construct
  modified_base 1: mod_base = OTHER; note = thymine
  misc_feature 1..16: note = Antisense oligonucleotide
  modified_base 1: mod_base = OTHER; note = misc_feature - bicyclic nucleic acid scaffold modification
  modified_base 3: mod_base = OTHER; note = misc_feature - bicyclic nucleic acid scaffold modification
  modified_base 10: mod_base = OTHER; note = misc_feature - bicyclic nucleic acid scaffold modification
  modified_base 16: mod_base = OTHER; note = misc_feature - bicyclic nucleic acid scaffold modification
  source 1..16: mol_type = other RNA
ttctgacaacagtttg

SEQ ID NO: 4385 - RNA, 16 nt, synthetic construct
  modified_base 1..2: mod_base = OTHER; note = thymine
  modified_base 15: mod_base = OTHER; note = thymine
  misc_feature 1..16: note = Antisense oligonucleotide
  modified_base 1..2: mod_base = OTHER; note = misc_feature - bicyclic nucleic acid scaffold modification
  modified_base 15..16: mod_base = OTHER; note = misc_feature - bicyclic nucleic acid scaffold modification
  source 1..16: mol_type = other RNA
ttctgacaacagtttg

SEQ ID NO: 4386 - RNA, 16 nt, synthetic construct
  modified_base 1..2: mod_base = OTHER; note = thymine
  modified_base 15: mod_base = OTHER; note = thymine
  misc_feature 1..16: note = Antisense oligonucleotide
  modified_base 1..2: mod_base = OTHER; note = misc_feature - bicyclic nucleic acid scaffold modification
  modified_base 7: mod_base = OTHER; note = misc_feature - bicyclic nucleic acid scaffold modification
  modified_base 15..16: mod_base = OTHER; note = misc_feature - bicyclic nucleic acid scaffold modification
  source 1..16: mol_type = other RNA
ttctgacaacagtttg

SEQ ID NO: 4387 - RNA, 16 nt, synthetic construct
  modified_base 1..2: mod_base = OTHER; note = thymine
  modified_base 15: mod_base = OTHER; note = thymine
  misc_feature 1..16: note = Antisense oligonucleotide
  modified_base 1..2: mod_base = OTHER; note = misc_feature - bicyclic nucleic acid scaffold modification
  modified_base 5: mod_base = OTHER; note = misc_feature - bicyclic nucleic acid scaffold modification
  modified_base 12: mod_base = OTHER; note = misc_feature - bicyclic nucleic acid scaffold modification
  modified_base 15..16: mod_base = OTHER; note = misc_feature - bicyclic nucleic acid scaffold modification
  source 1..16: mol_type = other RNA
ttctgacaacagtttg

SEQ ID NO: 4388 - RNA, 16 nt, synthetic construct
  modified_base 1: mod_base = OTHER; note = thymine
  misc_feature 1..16: note = Antisense oligonucleotide
  modified_base 1: mod_base = OTHER; note = misc_feature - bicyclic nucleic acid scaffold modification
  modified_base 16: mod_base = OTHER; note = misc_feature - bicyclic nucleic acid scaffold modification
  source 1..16: mol_type = other RNA
tctgacaacagtttgc

SEQ ID NO: 4389 - RNA, 16 nt, synthetic construct
  modified_base 1: mod_base = OTHER; note = thymine
  misc_feature 1..16: note = Antisense oligonucleotide
  modified_base 1: mod_base = OTHER; note = misc_feature - bicyclic nucleic acid scaffold modification
  modified_base 4: mod_base = OTHER; note = misc_feature - bicyclic nucleic acid scaffold modification
  modified_base 16: mod_base = OTHER; note = misc_feature - bicyclic nucleic acid scaffold modification
  source 1..16: mol_type = other RNA
tctgacaacagtttgc

SEQ ID NO: 4390 - RNA, 16 nt, synthetic construct
  modified_base 1: mod_base = OTHER; note = thymine
  misc_feature 1..16: note = Antisense oligonucleotide
  modified_base 1: mod_base = OTHER; note = misc_feature - bicyclic nucleic acid scaffold modification
  modified_base 11: mod_base = OTHER; note = misc_feature - bicyclic nucleic acid scaffold modification
  modified_base 16: mod_base = OTHER; note = misc_feature - bicyclic nucleic acid scaffold modification
  source 1..16: mol_type = other RNA
tctgacaacagtttgc

SEQ ID NO: 4391 - RNA, 16 nt, synthetic construct
  modified_base 1: mod_base = OTHER; note = thymine
  misc_feature 1..16: note = Antisense oligonucleotide
  modified_base 1: mod_base = OTHER; note = misc_feature - bicyclic nucleic acid scaffold modification
  modified_base 4: mod_base = OTHER; note = misc_feature - bicyclic nucleic acid scaffold modification
  modified_base 11: mod_base = OTHER; note = misc_feature - bicyclic nucleic acid scaffold modification
  modified_base 16: mod_base = OTHER; note = misc_feature - bicyclic nucleic acid scaffold modification
  source 1..16: mol_type = other RNA
tctgacaacagtttgc

SEQ ID NO: 4392 - RNA, 16 nt, synthetic construct
  modified_base 1: mod_base = OTHER; note = thymine
  misc_feature 1..16: note = Antisense oligonucleotide
  modified_base 1: mod_base = OTHER; note = misc_feature - bicyclic nucleic acid scaffold modification
  modified_base 9: mod_base = OTHER; note = misc_feature - bicyclic nucleic acid scaffold modification
  modified_base 16: mod_base = OTHER; note = misc_feature - bicyclic nucleic acid scaffold modification
  source 1..16: mol_type = other RNA
tctgacaacagtttgc

SEQ ID NO: 4393 - RNA, 16 nt, synthetic construct
  modified_base 1: mod_base = OTHER; note = thymine
  misc_feature 1..16: note = Antisense oligonucleotide
  modified_base 1: mod_base = OTHER; note = misc_feature - bicyclic nucleic acid scaffold modification
  modified_base 6: mod_base = OTHER; note = misc_feature - bicyclic nucleic acid scaffold modification
  modified_base 16: mod_base = OTHER; note = misc_feature - bicyclic nucleic acid scaffold modification
  source 1..16: mol_type = other RNA
tctgacaacagtttgc

SEQ ID NO: 4394 - RNA, 16 nt, synthetic construct
  modified_base 1: mod_base = OTHER; note = thymine
  misc_feature 1..16: note = Antisense oligonucleotide
  modified_base 1: mod_base = OTHER; note = misc_feature - bicyclic nucleic acid scaffold modification
  modified_base 6: mod_base = OTHER; note = misc_feature - bicyclic nucleic acid scaffold modification
  modified_base 9: mod_base = OTHER; note = misc_feature - bicyclic nucleic acid scaffold modification
  modified_base 16: mod_base = OTHER; note = misc_feature - bicyclic nucleic acid scaffold modification
  source 1..16: mol_type = other RNA
tctgacaacagtttgc

SEQ ID NO: 4395 - RNA, 16 nt, synthetic construct
  modified_base 1: mod_base = OTHER; note = thymine
  misc_feature 1..16: note = Antisense oligonucleotide
  modified_base 1: mod_base = OTHER; note = misc_feature - bicyclic nucleic acid scaffold modification
  modified_base 11: mod_base = OTHER; note = misc_feature - bicyclic nucleic acid scaffold modification
  modified_base 15..16: mod_base = OTHER; note = misc_feature - bicyclic nucleic acid scaffold modification
  source 1..16: mol_type = other RNA
tctgacaacagtttgc

SEQ ID NO: 4396 - RNA, 16 nt, synthetic construct
  modified_base 1: mod_base = OTHER; note = thymine
  misc_feature 1..16: note = Antisense oligonucleotide
  modified_base 1: mod_base = OTHER; note = misc_feature - bicyclic nucleic acid scaffold modification
  modified_base 4: mod_base = OTHER; note = misc_feature - bicyclic nucleic acid scaffold modification
  modified_base 11: mod_base = OTHER; note = misc_feature - bicyclic nucleic acid scaffold modification
  modified_base 15..16: mod_base = OTHER; note = misc_feature - bicyclic nucleic acid scaffold modification
  source 1..16: mol_type = other RNA
tctgacaacagtttgc

SEQ ID NO: 4397 - RNA, 16 nt, synthetic construct
  modified_base 1: mod_base = OTHER; note = thymine
  misc_feature 1..16: note = Antisense oligonucleotide
  modified_base 1..2: mod_base = OTHER; note = misc_feature - bicyclic nucleic acid scaffold modification
  modified_base 4: mod_base = OTHER; note = misc_feature - bicyclic nucleic acid scaffold modification
  modified_base 11: mod_base = OTHER; note = misc_feature - bicyclic nucleic acid scaffold modification
  modified_base 15..16: mod_base = OTHER; note = misc_feature - bicyclic nucleic acid scaffold modification
  source 1..16: mol_type = other RNA
tctgacaacagtttgc

SEQ ID NO: 4398 - RNA, 16 nt, synthetic construct
  modified_base 1: mod_base = OTHER; note = thymine
  misc_feature 1..16: note = Antisense oligonucleotide
  modified_base 1..2: mod_base = OTHER; note = misc_feature - bicyclic nucleic acid scaffold modification
  modified_base 15..16: mod_base = OTHER; note = misc_feature - bicyclic nucleic acid scaffold modification
  source 1..16: mol_type = other RNA
tctgacaacagtttgc

SEQ ID NO: 4399 - RNA, 16 nt, synthetic construct
  modified_base 1: mod_base = OTHER; note = thymine
  misc_feature 1..16: note = Antisense oligonucleotide
  modified_base 1..2: mod_base = OTHER; note = misc_feature - bicyclic nucleic acid scaffold modification
  modified_base 9: mod_base = OTHER; note = misc_feature - bicyclic nucleic acid scaffold modification
  modified_base 15..16: mod_base = OTHER; note = misc_feature - bicyclic nucleic acid scaffold modification
  source 1..16: mol_type = other RNA
tctgacaacagtttgc

SEQ ID NO: 4400 - RNA, 16 nt, synthetic construct
  modified_base 1: mod_base = OTHER; note = thymine
  misc_feature 1..16: note = Antisense oligonucleotide
  modified_base 1..2: mod_base = OTHER; note = misc_feature - bicyclic nucleic acid scaffold modification
  modified_base 6: mod_base = OTHER; note = misc_feature - bicyclic nucleic acid scaffold modification
  modified_base 11: mod_base = OTHER; note = misc_feature - bicyclic nucleic acid scaffold modification
  modified_base 15..16: mod_base = OTHER; note = misc_feature - bicyclic nucleic acid scaffold modification
  source 1..16: mol_type = other RNA
tctgacaacagtttgc

SEQ ID NO: 4401 - RNA, 21 nt, synthetic construct
  misc_feature 1..21: note = Antisense oligonucleotide
  modified_base 1: mod_base = OTHER; note = misc_feature - bicyclic nucleic acid scaffold modification
  modified_base 21: mod_base = OTHER; note = misc_feature - bicyclic nucleic acid scaffold modification
  source 1..21: mol_type = other RNA
ctgcccaatgccatcctggag

SEQ ID NO: 4402 - RNA, 21 nt, synthetic construct
  misc_feature 1..21: note = Antisense oligonucleotide
  modified_base 1: mod_base = OTHER; note = misc_feature - bicyclic nucleic acid scaffold modification
  modified_base 3: mod_base = OTHER; note = misc_feature - bicyclic nucleic acid scaffold modification
  modified_base 21: mod_base = OTHER; note = misc_feature - bicyclic nucleic acid scaffold modification
  source 1..21: mol_type = other RNA
ctgcccaatgccatcctggag

SEQ ID NO: 4403 - RNA, 21 nt, synthetic construct
  misc_feature 1..21: note = Antisense oligonucleotide
  modified_base 1: mod_base = OTHER; note = misc_feature - bicyclic nucleic acid scaffold modification
  modified_base 10: mod_base = OTHER; note = misc_feature - bicyclic nucleic acid scaffold modification
  modified_base 21: mod_base = OTHER; note = misc_feature - bicyclic nucleic acid scaffold modification
  source 1..21: mol_type = other RNA
ctgcccaatgccatcctggag

SEQ ID NO: 4404 - RNA, 21 nt, synthetic construct
  misc_feature 1..21: note = Antisense oligonucleotide
  modified_base 1: mod_base = OTHER; note = misc_feature - bicyclic nucleic acid scaffold modification
  modified_base 18: mod_base = OTHER; note = misc_feature - bicyclic nucleic acid scaffold modification
  modified_base 21: mod_base = OTHER; note = misc_feature - bicyclic nucleic acid scaffold modification
  source 1..21: mol_type = other RNA
ctgcccaatgccatcctggag

SEQ ID NO: 4405 - RNA, 21 nt, synthetic construct
  misc_feature 1..21: note = Antisense oligonucleotide
  modified_base 1: mod_base = OTHER; note = misc_feature - bicyclic nucleic acid scaffold modification
  modified_base 19: mod_base = OTHER; note = misc_feature - bicyclic nucleic acid scaffold modification
  modified_base 21: mod_base = OTHER; note = misc_feature - bicyclic nucleic acid scaffold modification
  source 1..21: mol_type = other RNA
ctgcccaatgccatcctggag

SEQ ID NO: 4406 - RNA, 21 nt, synthetic construct
  misc_feature 1..21: note = Antisense oligonucleotide
  modified_base 1: mod_base = OTHER; note = misc_feature - bicyclic nucleic acid scaffold modification
  modified_base 3: mod_base = OTHER; note = misc_feature - bicyclic nucleic acid scaffold modification
  modified_base 19: mod_base = OTHER; note = misc_feature - bicyclic nucleic acid scaffold modification
  modified_base 21: mod_base = OTHER; note = misc_feature - bicyclic nucleic acid scaffold modification
  source 1..21: mol_type = other RNA
ctgcccaatgccatcctggag

SEQ ID NO: 4407 - RNA, 21 nt, synthetic construct
  misc_feature 1..21: note = Antisense oligonucleotide
  modified_base 1: mod_base = OTHER; note = misc_feature - bicyclic nucleic acid scaffold modification
  modified_base 10: mod_base = OTHER; note = misc_feature - bicyclic nucleic acid scaffold modification
  modified_base 18: mod_base = OTHER; note = misc_feature - bicyclic nucleic acid scaffold modification
  modified_base 21: mod_base = OTHER; note = misc_feature - bicyclic nucleic acid scaffold modification
  source 1..21: mol_type = other RNA
ctgcccaatgccatcctggag

SEQ ID NO: 4408 - RNA, 21 nt, synthetic construct
  misc_feature 1..21: note = Antisense oligonucleotide
  modified_base 1: mod_base = OTHER; note = misc_feature - bicyclic nucleic acid scaffold modification
  modified_base 3: mod_base = OTHER; note = misc_feature - bicyclic nucleic acid scaffold modification
  modified_base 10: mod_base = OTHER; note = misc_feature - bicyclic nucleic acid scaffold modification
  modified_base 21: mod_base = OTHER; note = misc_feature - bicyclic nucleic acid scaffold modification
  source 1..21: mol_type = other RNA
ctgcccaatgccatcctggag

SEQ ID NO: 4409 - RNA, 21 nt, synthetic construct
  misc_feature 1..21: note = Antisense oligonucleotide
  modified_base 1: mod_base = OTHER; note = misc_feature - bicyclic nucleic acid scaffold modification
  modified_base 16: mod_base = OTHER; note = misc_feature - bicyclic nucleic acid scaffold modification
  modified_base 21: mod_base = OTHER; note = misc_feature - bicyclic nucleic acid scaffold modification
  source 1..21: mol_type = other RNA
ctgcccaatgccatcctggag

SEQ ID NO: 4410 - RNA, 21 nt, synthetic construct
  misc_feature 1..21: note = Antisense oligonucleotide
  modified_base 1: mod_base = OTHER; note = misc_feature - bicyclic nucleic acid scaffold modification
  modified_base 12: mod_base = OTHER; note = misc_feature - bicyclic nucleic acid scaffold modification
  modified_base 21: mod_base = OTHER; note = misc_feature - bicyclic nucleic acid scaffold modification
  source 1..21: mol_type = other RNA
ctgcccaatgccatcctggag

SEQ ID NO: 4411 - RNA, 21 nt, synthetic construct
  misc_feature 1..21: note = Antisense oligonucleotide
  modified_base 1: mod_base = OTHER; note = misc_feature - bicyclic nucleic acid scaffold modification
  modified_base 6: mod_base = OTHER; note = misc_feature - bicyclic nucleic acid scaffold modification
  modified_base 21: mod_base = OTHER; note = misc_feature - bicyclic nucleic acid scaffold modification
  source 1..21: mol_type = other RNA
ctgcccaatgccatcctggag

SEQ ID NO: 4412 - RNA, 21 nt, synthetic construct
  misc_feature 1..21: note = Antisense oligonucleotide
  modified_base 1: mod_base = OTHER; note = misc_feature - bicyclic nucleic acid scaffold modification
  modified_base 6: mod_base = OTHER; note = misc_feature - bicyclic nucleic acid scaffold modification
  modified_base 12: mod_base = OTHER; note = misc_feature - bicyclic nucleic acid scaffold modification
  modified_base 21: mod_base = OTHER; note = misc_feature - bicyclic nucleic acid scaffold modification
  source 1..21: mol_type = other RNA
ctgcccaatgccatcctggag

SEQ ID NO: 4413 - RNA, 21 nt, synthetic construct
  misc_feature 1..21: note = Antisense oligonucleotide
  modified_base 1: mod_base = OTHER; note = misc_feature - bicyclic nucleic acid scaffold modification
  modified_base 12: mod_base = OTHER; note = misc_feature - bicyclic nucleic acid scaffold modification
  modified_base 16: mod_base = OTHER; note = misc_feature - bicyclic nucleic acid scaffold modification
  modified_base 21: mod_base = OTHER; note = misc_feature - bicyclic nucleic acid scaffold modification
  source 1..21: mol_type = other RNA
ctgcccaatgccatcctggag

SEQ ID NO: 4414 - RNA, 21 nt, synthetic construct
  misc_feature 1..21: note = Antisense oligonucleotide
  modified_base 1: mod_base = OTHER; note = misc_feature - bicyclic nucleic acid scaffold modification
  modified_base 6: mod_base = OTHER; note = misc_feature - bicyclic nucleic acid scaffold modification
  modified_base 12: mod_base = OTHER; note = misc_feature - bicyclic nucleic acid scaffold modification
  modified_base 16: mod_base = OTHER; note = misc_feature - bicyclic nucleic acid scaffold modification
  modified_base 21: mod_base = OTHER; note = misc_feature - bicyclic nucleic acid scaffold modification
  source 1..21: mol_type = other RNA
ctgcccaatgccatcctggag

SEQ ID NO: 4415 - RNA, 21 nt, synthetic construct
  modified_base 2: mod_base = OTHER; note = thymine
  misc_feature 1..21: note = Antisense oligonucleotide
  modified_base 1..2: mod_base = OTHER; note = misc_feature - bicyclic nucleic acid scaffold modification
  modified_base 20..21: mod_base = OTHER; note = misc_feature - bicyclic nucleic acid scaffold modification
  source 1..21: mol_type = other RNA
ctgcccaatgccatcctggag

SEQ ID NO: 4416 - RNA, 21 nt, synthetic construct
  modified_base 2: mod_base = OTHER; note = thymine
  misc_feature 1..21: note = Antisense oligonucleotide
  modified_base 1..2: mod_base = OTHER; note = misc_feature - bicyclic nucleic acid scaffold modification
  modified_base 10: mod_base = OTHER; note = misc_feature - bicyclic nucleic acid scaffold modification
  modified_base 20..21: mod_base = OTHER; note = misc_feature - bicyclic nucleic acid scaffold modification
  source 1..21: mol_type = other RNA
ctgcccaatgccatcctggag

SEQ ID NO: 4417 - RNA, 21 nt, synthetic construct
  modified_base 2: mod_base = OTHER; note = thymine
  misc_feature 1..21: note = Antisense oligonucleotide
  modified_base 1..2: mod_base = OTHER; note = misc_feature - bicyclic nucleic acid scaffold modification
  modified_base 6: mod_base = OTHER; note = misc_feature - bicyclic nucleic acid scaffold modification
  modified_base 16: mod_base = OTHER; note = misc_feature - bicyclic nucleic acid scaffold modification
  modified_base 20..21: mod_base = OTHER; note = misc_feature - bicyclic nucleic acid scaffold modification
  source 1..21: mol_type = other RNA
ctgcccaatgccatcctggag

SEQ ID NO: 4418 - RNA, 18 nt, synthetic construct
  misc_feature 1..18: note = Antisense oligonucleotide
  modified_base 1: mod_base = OTHER; note = misc_feature - bicyclic nucleic acid scaffold modification
  modified_base 18: mod_base = OTHER; note = misc_feature - bicyclic nucleic acid scaffold modification
  source 1..18: mol_type = other RNA
ctgcccaatgccatcctg

SEQ ID NO: 4419 - RNA, 18 nt, synthetic construct
  misc_feature 1..18: note = Antisense oligonucleotide
  modified_base 1: mod_base = OTHER; note = misc_feature - bicyclic nucleic acid scaffold modification
  modified_base 3: mod_base = OTHER; note = misc_feature - bicyclic nucleic acid scaffold modification
  modified_base 18: mod_base = OTHER; note = misc_feature - bicyclic nucleic acid scaffold modification
  source 1..18: mol_type = other RNA
ctgcccaatgccatcctg

SEQ ID NO: 4420 - RNA, 18 nt, synthetic construct
  misc_feature 1..18: note = Antisense oligonucleotide
  modified_base 1: mod_base = OTHER; note = misc_feature - bicyclic nucleic acid scaffold modification
  modified_base 10: mod_base = OTHER; note = misc_feature - bicyclic nucleic acid scaffold modification
  modified_base 18: mod_base = OTHER; note = misc_feature - bicyclic nucleic acid scaffold modification
  source 1..18: mol_type = other RNA
ctgcccaatgccatcctg

SEQ ID NO: 4421 - RNA, 18 nt, synthetic construct
  misc_feature 1..18: note = Antisense oligonucleotide
  modified_base 1: mod_base = OTHER; note = misc_feature - bicyclic nucleic acid scaffold modification
  modified_base 3: mod_base = OTHER; note = misc_feature - bicyclic nucleic acid scaffold modification
  modified_base 10: mod_base = OTHER; note = misc_feature - bicyclic nucleic acid scaffold modification
  modified_base 18: mod_base = OTHER; note = misc_feature - bicyclic nucleic acid scaffold modification
  source 1..18: mol_type = other RNA
ctgcccaatgccatcctg

SEQ ID NO: 4422 - RNA, 18 nt, synthetic construct
  misc_feature 1..18: note = Antisense oligonucleotide
  modified_base 1: mod_base = OTHER; note = misc_feature - bicyclic nucleic acid scaffold modification
  modified_base 16: mod_base = OTHER; note = misc_feature - bicyclic nucleic acid scaffold modification
  modified_base 18: mod_base = OTHER; note = misc_feature - bicyclic nucleic acid scaffold modification
  source 1..18: mol_type = other RNA
ctgcccaatgccatcctg

SEQ ID NO: 4423 - RNA, 18 nt, synthetic construct
  misc_feature 1..18: note = Antisense oligonucleotide
  modified_base 1: mod_base = OTHER; note = misc_feature - bicyclic nucleic acid scaffold modification
  modified_base 12: mod_base = OTHER; note = misc_feature - bicyclic nucleic acid scaffold modification
  modified_base 18: mod_base = OTHER; note = misc_feature - bicyclic nucleic acid scaffold modification
  source 1..18: mol_type = other RNA
ctgcccaatgccatcctg

SEQ ID NO: 4424 - RNA, 18 nt, synthetic construct
  misc_feature 1..18: note = Antisense oligonucleotide
  modified_base 1: mod_base = OTHER; note = misc_feature - bicyclic nucleic acid scaffold modification
  modified_base 6: mod_base = OTHER; note = misc_feature - bicyclic nucleic acid scaffold modification
  modified_base 18: mod_base = OTHER; note = misc_feature - bicyclic nucleic acid scaffold modification
  source 1..18: mol_type = other RNA
ctgcccaatgccatcctg

SEQ ID NO: 4425 - RNA, 18 nt, synthetic construct
  misc_feature 1..18: note = Antisense oligonucleotide
  modified_base 1: mod_base = OTHER; note = misc_feature - bicyclic nucleic acid scaffold modification
  modified_base 6: mod_base = OTHER; note = misc_feature - bicyclic nucleic acid scaffold modification
  modified_base 12: mod_base = OTHER; note = misc_feature - bicyclic nucleic acid scaffold modification
  modified_base 18: mod_base = OTHER; note = misc_feature - bicyclic nucleic acid scaffold modification
  source 1..18: mol_type = other RNA
ctgcccaatgccatcctg

SEQ ID NO: 4426 - RNA, 18 nt, synthetic construct
  modified_base 2: mod_base = OTHER; note = thymine
  modified_base 17: mod_base = OTHER; note = thymine
  misc_feature 1..18: note = Antisense oligonucleotide
  modified_base 1..2: mod_base = OTHER; note = misc_feature - bicyclic nucleic acid scaffold modification
  modified_base 17..18: mod_base = OTHER; note = misc_feature - bicyclic nucleic acid scaffold modification
  source 1..18: mol_type = other RNA
ctgcccaatgccatcctg

SEQ ID NO: 4427 - RNA, 18 nt, synthetic construct
  modified_base 2: mod_base = OTHER; note = thymine
  modified_base 17: mod_base = OTHER; note = thymine
  misc_feature 1..18: note = Antisense oligonucleotide
  modified_base 1..2: mod_base = OTHER; note = misc_feature - bicyclic nucleic acid scaffold modification
  modified_base 10: mod_base = OTHER; note = misc_feature - bicyclic nucleic acid scaffold modification
  modified_base 17..18: mod_base = OTHER; note = misc_feature - bicyclic nucleic acid scaffold modification
  source 1..18: mol_type = other RNA
ctgcccaatgccatcctg

SEQ ID NO: 4428 - RNA, 18 nt, synthetic construct
  modified_base 2: mod_base = OTHER; note = thymine
  modified_base 17: mod_base = OTHER; note = thymine
  misc_feature 1..18: note = Antisense oligonucleotide
  modified_base 1..2: mod_base = OTHER; note = misc_feature - bicyclic nucleic acid scaffold modification
  modified_base 6: mod_base = OTHER; note = misc_feature - bicyclic nucleic acid scaffold modification
  modified_base 12: mod_base = OTHER; note = misc_feature - bicyclic nucleic acid scaffold modification
  modified_base 17..18: mod_base = OTHER; note = misc_feature - bicyclic nucleic acid scaffold modification
  source 1..18: mol_type = other RNA
ctgcccaatgccatcctg

SEQ ID NO: 4429 - RNA, 18 nt, synthetic construct
  modified_base 1: mod_base = OTHER; note = thymine
  misc_feature 1..18: note = Antisense oligonucleotide
  modified_base 1: mod_base = OTHER; note = misc_feature - bicyclic nucleic acid scaffold modification
  modified_base 18: mod_base = OTHER; note = misc_feature - bicyclic nucleic acid scaffold modification
  source 1..18: mol_type = other RNA
tgcccaatgccatcctgg

SEQ ID NO: 4430 - RNA, 18 nt, synthetic construct
  modified_base 1: mod_base = OTHER; note = thymine
  misc_feature 1..18: note = Antisense oligonucleotide
  modified_base 1..2: mod_base = OTHER; note = misc_feature - bicyclic nucleic acid scaffold modification
  modified_base 18: mod_base = OTHER; note = misc_feature - bicyclic nucleic acid scaffold modification
  source 1..18: mol_type = other RNA
tgcccaatgccatcctgg

SEQ ID NO: 4431 - RNA, 18 nt, synthetic construct
  modified_base 1: mod_base = OTHER; note = thymine
  misc_feature 1..18: note = Antisense oligonucleotide
  modified_base 1: mod_base = OTHER; note = misc_feature - bicyclic nucleic acid scaffold modification
  modified_base 9: mod_base = OTHER; note = misc_feature - bicyclic nucleic acid scaffold modification
  modified_base 18: mod_base = OTHER; note = misc_feature - bicyclic nucleic acid scaffold modification
  source 1..18: mol_type = other RNA
tgcccaatgccatcctgg

SEQ ID NO: 4432 - RNA, 18 nt, synthetic construct
  modified_base 1: mod_base = OTHER; note = thymine
  misc_feature 1..18: note = Antisense oligonucleotide
  modified_base 1: mod_base = OTHER; note = misc_feature - bicyclic nucleic acid scaffold modification
  modified_base 17..18: mod_base = OTHER; note = misc_feature - bicyclic nucleic acid scaffold modification
  source 1..18: mol_type = other RNA
tgcccaatgccatcctgg

SEQ ID NO: 4433 - RNA, 18 nt, synthetic construct
  modified_base 1: mod_base = OTHER; note = thymine
  misc_feature 1..18: note = Antisense oligonucleotide
  modified_base 1..2: mod_base = OTHER; note = misc_feature - bicyclic nucleic acid scaffold modification
  modified_base 9: mod_base = OTHER; note = misc_feature - bicyclic nucleic acid scaffold modification
  modified_base 17..18: mod_base = OTHER; note = misc_feature - bicyclic nucleic acid scaffold modification
  source 1..18: mol_type = other RNA
tgcccaatgccatcctgg

SEQ ID NO: 4434 - RNA, 18 nt, synthetic construct
  modified_base 1: mod_base = OTHER; note = thymine
  misc_feature 1..18: note = Antisense oligonucleotide
  modified_base 1: mod_base = OTHER; note = misc_feature - bicyclic nucleic acid scaffold modification
  modified_base 15: mod_base = OTHER; note = misc_feature - bicyclic nucleic acid scaffold modification
  modified_base 18: mod_base = OTHER; note = misc_feature - bicyclic nucleic acid scaffold modification
  source 1..18: mol_type = other RNA
tgcccaatgccatcctgg

SEQ ID NO: 4435 - RNA, 18 nt, synthetic construct
  modified_base 1: mod_base = OTHER; note = thymine
  misc_feature 1..18: note = Antisense oligonucleotide
  modified_base 1: mod_base = OTHER; note = misc_feature - bicyclic nucleic acid scaffold modification
  modified_base 11: mod_base = OTHER; note = misc_feature - bicyclic nucleic acid scaffold modification
  modified_base 18: mod_base = OTHER; note = misc_feature - bicyclic nucleic acid scaffold modification
  source 1..18: mol_type = other RNA
tgcccaatgccatcctgg

SEQ ID NO: 4436 - RNA, 18 nt, synthetic construct
  modified_base 1: mod_base = OTHER; note = thymine
  misc_feature 1..18: note = Antisense oligonucleotide
  modified_base 1: mod_base = OTHER; note = misc_feature - bicyclic nucleic acid scaffold modification
  modified_base 5: mod_base = OTHER; note = misc_feature - bicyclic nucleic acid scaffold modification
  modified_base 18: mod_base = OTHER; note = misc_feature - bicyclic nucleic acid scaffold modification
  source 1..18: mol_type = other RNA
tgcccaatgccatcctgg

SEQ ID NO: 4437 - RNA, 18 nt, synthetic construct
  modified_base 1: mod_base = OTHER; note = thymine
  misc_feature 1..18: note = Antisense oligonucleotide
  modified_base 1: mod_base = OTHER; note = misc_feature - bicyclic nucleic acid scaffold modification
  modified_base 5: mod_base = OTHER; note = misc_feature - bicyclic nucleic acid scaffold modification
  modified_base 11: mod_base = OTHER; note = misc_feature - bicyclic nucleic acid scaffold modification
  modified_base 18: mod_base = OTHER; note = misc_feature - bicyclic nucleic acid scaffold modification
  source 1..18: mol_type = other RNA
tgcccaatgccatcctgg

SEQ ID NO: 4438 - RNA, 18 nt, synthetic construct
  modified_base 1: mod_base = OTHER; note = thymine
  misc_feature 1..18: note = Antisense oligonucleotide
  modified_base 1: mod_base = OTHER; note = misc_feature - bicyclic nucleic acid scaffold modification
  modified_base 11: mod_base = OTHER; note = misc_feature - bicyclic nucleic acid scaffold modification
  modified_base 15: mod_base = OTHER; note = misc_feature - bicyclic nucleic acid scaffold modification
  modified_base 18: mod_base = OTHER; note = misc_feature - bicyclic nucleic acid scaffold modification
  source 1..18: mol_type = other RNA
tgcccaatgccatcctgg

SEQ ID NO: 4439 - RNA, 18 nt, synthetic construct
  modified_base 1: mod_base = OTHER; note = thymine
  misc_feature 1..18: note = Antisense oligonucleotide
  modified_base 1..2: mod_base = OTHER; note = misc_feature - bicyclic nucleic acid scaffold modification
  modified_base 5: mod_base = OTHER; note = misc_feature - bicyclic nucleic acid scaffold modification
  modified_base 14: mod_base = OTHER; note = misc_feature - bicyclic nucleic acid scaffold modification
  modified_base 17..18: mod_base = OTHER; note = misc_feature - bicyclic nucleic acid scaffold modification
  source 1..18: mol_type = other RNA
tgcccaatgccatcctgg

SEQ ID NO: 4440 - RNA, 18 nt, synthetic construct
  misc_feature 1..18: note = Antisense oligonucleotide
  modified_base 1: mod_base = OTHER; note = misc_feature - bicyclic nucleic acid scaffold modification
  modified_base 18: mod_base = OTHER; note = misc_feature - bicyclic nucleic acid scaffold modification
  source 1..18: mol_type = other RNA
gcccaatgccatcctgga

SEQ ID NO: 4441 - RNA, 18 nt, synthetic construct
  misc_feature 1..18: note = Antisense oligonucleotide
  modified_base 1: mod_base = OTHER; note = misc_feature - bicyclic nucleic acid scaffold modification
  modified_base 8: mod_base = OTHER; note = misc_feature - bicyclic nucleic acid scaffold modification
  modified_base 18: mod_base = OTHER; note = misc_feature - bicyclic nucleic acid scaffold modification
  source 1..18: mol_type = other RNA
gcccaatgccatcctgga

SEQ ID NO: 4442 - RNA, 18 nt, synthetic construct
  misc_feature 1..18: note = Antisense oligonucleotide
  modified_base 1: mod_base = OTHER; note = misc_feature - bicyclic nucleic acid scaffold modification
  modified_base 16: mod_base = OTHER; note = misc_feature - bicyclic nucleic acid scaffold modification
  modified_base 18: mod_base = OTHER; note = misc_feature - bicyclic nucleic acid scaffold modification
  source 1..18: mol_type = other RNA
gcccaatgccatcctgga

SEQ ID NO: 4443 - RNA, 18 nt, synthetic construct
  misc_feature 1..18: note = Antisense oligonucleotide
  modified_base 1: mod_base = OTHER; note = misc_feature - bicyclic nucleic acid scaffold modification
  modified_base 8: mod_base = OTHER; note = misc_feature - bicyclic nucleic acid scaffold modification
  modified_base 16: mod_base = OTHER; note = misc_feature - bicyclic nucleic acid scaffold modification
  modified_base 18: mod_base = OTHER; note = misc_feature - bicyclic nucleic acid scaffold modification
  source 1..18: mol_type = other RNA
gcccaatgccatcctgga

SEQ ID NO: 4444 - RNA, 18 nt, synthetic construct
  misc_feature 1..18: note = Antisense oligonucleotide
  modified_base 1: mod_base = OTHER; note = misc_feature - bicyclic nucleic acid scaffold modification
  modified_base 14: mod_base = OTHER; note = misc_feature - bicyclic nucleic acid scaffold modification
  modified_base 18: mod_base = OTHER; note = misc_feature - bicyclic nucleic acid scaffold modification
  source 1..18: mol_type = other RNA
gcccaatgccatcctgga

SEQ ID NO: 4445 - RNA, 18 nt, synthetic construct
  misc_feature 1..18: note = Antisense oligonucleotide
  modified_base 1: mod_base = OTHER; note = misc_feature - bicyclic nucleic acid scaffold modification
  modified_base 10: mod_base = OTHER; note = misc_feature - bicyclic nucleic acid scaffold modification
  modified_base 18: mod_base = OTHER; note = misc_feature - bicyclic nucleic acid scaffold modification
  source 1..18: mol_type = other RNA
gcccaatgccatcctgga

SEQ ID NO: 4446 - RNA, 18 nt, synthetic construct
  misc_feature 1..18: note = Antisense oligonucleotide
  modified_base 1: mod_base = OTHER; note = misc_feature - bicyclic nucleic acid scaffold modification
  modified_base 4: mod_base = OTHER; note = misc_feature - bicyclic nucleic acid scaffold modification
  modified_base 18: mod_base = OTHER; note = misc_feature - bicyclic nucleic acid scaffold modification
  source 1..18: mol_type = other RNA
gcccaatgccatcctgga

SEQ ID NO: 4447 - RNA, 18 nt, synthetic construct
  misc_feature 1..18: note = Antisense oligonucleotide
  modified_base 1: mod_base = OTHER; note = misc_feature - bicyclic nucleic acid scaffold modification
  modified_base 4: mod_base = OTHER; note = misc_feature - bicyclic nucleic acid scaffold modification
  modified_base 10: mod_base = OTHER; note = misc_feature - bicyclic nucleic acid scaffold modification
  modified_base 18: mod_base = OTHER; note = misc_feature - bicyclic nucleic acid scaffold modification
  source 1..18: mol_type = other RNA
gcccaatgccatcctgga

SEQ ID NO: 4448 - RNA, 18 nt, synthetic construct
  misc_feature 1..18: note = Antisense oligonucleotide
  modified_base 1: mod_base = OTHER; note = misc_feature - bicyclic nucleic acid scaffold modification
  modified_base 10: mod_base = OTHER; note = misc_feature - bicyclic nucleic acid scaffold modification
  modified_base 18: mod_base = OTHER; note = misc_feature - bicyclic nucleic acid scaffold modification
  source 1..18: mol_type = other RNA
gcccaatgccatcctgga

SEQ ID NO: 4449 - RNA, 18 nt, synthetic construct
  misc_feature 1..18: note = Antisense oligonucleotide
  modified_base 1: mod_base = OTHER; note = misc_feature - bicyclic nucleic acid scaffold modification
  modified_base 9: mod_base = OTHER; note = misc_feature - bicyclic nucleic acid scaffold modification
  modified_base 14: mod_base = OTHER; note = misc_feature - bicyclic nucleic acid scaffold modification
  modified_base 18: mod_base = OTHER; note = misc_feature - bicyclic nucleic acid scaffold modification
  source 1..18: mol_type = other RNA
gcccaatgccatcctgga

SEQ ID NO: 4450 - RNA, 18 nt, synthetic construct
  misc_feature 1..18: note = Antisense oligonucleotide
  modified_base 1..2: mod_base = OTHER; note = misc_feature - bicyclic nucleic acid scaffold modification
  modified_base 17..18: mod_base = OTHER; note = misc_feature - bicyclic nucleic acid scaffold modification
  source 1..18: mol_type = other RNA
gcccaatgccatcctgga

SEQ ID NO: 4451 - RNA, 18 nt, synthetic construct
  misc_feature 1..18: note = Antisense oligonucleotide
  modified_base 1..2: mod_base = OTHER; note = misc_feature - bicyclic nucleic acid scaffold modification
  modified_base 8: mod_base = OTHER; note = misc_feature - bicyclic nucleic acid scaffold modification
  modified_base 17..18: mod_base = OTHER; note = misc_feature - bicyclic nucleic acid scaffold modification
  source 1..18: mol_type = other RNA
gcccaatgccatcctgga

SEQ ID NO: 4452 - RNA, 18 nt, synthetic construct
  misc_feature 1..18: note = Antisense oligonucleotide
  modified_base 1..2: mod_base = OTHER; note = misc_feature - bicyclic nucleic acid scaffold modification
  modified_base 4: mod_base = OTHER; note = misc_feature - bicyclic nucleic acid scaffold modification
  modified_base 13: mod_base = OTHER; note = misc_feature - bicyclic nucleic acid scaffold modification
  modified_base 17..18: mod_base = OTHER; note = misc_feature - bicyclic nucleic acid scaffold modification
  source 1..18: mol_type = other RNA
gcccaatgccatcctgga

SEQ ID NO: 4453 - RNA, 18 nt, synthetic construct
  misc_feature 1..18: note = Antisense oligonucleotide
  modified_base 1: mod_base = OTHER; note = misc_feature - bicyclic nucleic acid scaffold modification
  modified_base 18: mod_base = OTHER; note = misc_feature - bicyclic nucleic acid scaffold modification
  source 1..18: mol_type = other RNA
cccaatgccatcctggag

SEQ ID NO: 4454 - RNA, 18 nt, synthetic construct
  misc_feature 1..18: note = Antisense oligonucleotide
  modified_base 1: mod_base = OTHER; note = misc_feature - bicyclic nucleic acid scaffold modification
  modified_base 7: mod_base = OTHER; note = misc_feature - bicyclic nucleic acid scaffold modification
  modified_base 18: mod_base = OTHER; note = misc_feature - bicyclic nucleic acid scaffold modification
  source 1..18: mol_type = other RNA
cccaatgccatcctggag

SEQ ID NO: 4455 - RNA, 18 nt, synthetic construct
  misc_feature 1..18: note = Antisense oligonucleotide
  modified_base 1: mod_base = OTHER; note = misc_feature - bicyclic nucleic acid scaffold modification
  modified_base 15: mod_base = OTHER; note = misc_feature - bicyclic nucleic acid scaffold modification
  modified_base 18: mod_base = OTHER; note = misc_feature - bicyclic nucleic acid scaffold modification
  source 1..18: mol_type = other RNA
cccaatgccatcctggag

SEQ ID NO: 4456 - RNA, 18 nt, synthetic construct
  misc_feature 1..18: note = Antisense oligonucleotide
  modified_base 1: mod_base = OTHER; note = misc_feature - bicyclic nucleic acid scaffold modification
  modified_base 7: mod_base = OTHER; note = misc_feature - bicyclic nucleic acid scaffold modification
  modified_base 15: mod_base = OTHER; note = misc_feature - bicyclic nucleic acid scaffold modification
  modified_base 18: mod_base = OTHER; note = misc_feature - bicyclic nucleic acid scaffold modification
  source 1..18: mol_type = other RNA
cccaatgccatcctggag

SEQ ID NO: 4457 - RNA, 18 nt, synthetic construct
  misc_feature 1..18: note = Antisense oligonucleotide
  modified_base 1: mod_base = OTHER; note = misc_feature - bicyclic nucleic acid scaffold modification
  modified_base 9: mod_base = OTHER; note = misc_feature - bicyclic nucleic acid scaffold modification
  modified_base 13: mod_base = OTHER; note = misc_feature - bicyclic nucleic acid scaffold modification
  modified_base 18: mod_base = OTHER; note = misc_feature - bicyclic nucleic acid scaffold modification
  source 1..18: mol_type = other RNA
cccaatgccatcctggag

SEQ ID NO: 4458 - RNA, 18 nt, synthetic construct
  misc_feature 1..18: note = Antisense oligonucleotide
  modified_base 1: mod_base = OTHER; note = misc_feature - bicyclic nucleic acid scaffold modification
  modified_base 9: mod_base = OTHER; note = misc_feature - bicyclic nucleic acid scaffold modification
  modified_base 18: mod_base = OTHER; note = misc_feature - bicyclic nucleic acid scaffold modification
  source 1..18: mol_type = other RNA
cccaatgccatcctggag

SEQ ID NO: 4459 - RNA, 18 nt, synthetic construct
  misc_feature 1..18: note = Antisense oligonucleotide
  modified_base 1: mod_base = OTHER; note = misc_feature - bicyclic nucleic acid scaffold modification
  modified_base 3: mod_base = OTHER; note = misc_feature - bicyclic nucleic acid scaffold modification
  modified_base 12: mod_base = OTHER; note = misc_feature - bicyclic nucleic acid scaffold modification
  modified_base 18: mod_base = OTHER; note = misc_feature - bicyclic nucleic acid scaffold modification
  source 1..18: mol_type = other RNA
cccaatgccatcctggag

SEQ ID NO: 4460 - RNA, 18 nt, synthetic construct
  misc_feature 1..18: note = Antisense oligonucleotide
  modified_base 1: mod_base = OTHER; note = misc_feature - bicyclic nucleic acid scaffold modification
  modified_base 7: mod_base = OTHER; note = misc_feature - bicyclic nucleic acid scaffold modification
  modified_base 12: mod_base = OTHER; note = misc_feature - bicyclic nucleic acid scaffold modification
  modified_base 18: mod_base = OTHER; note = misc_feature - bicyclic nucleic acid scaffold modification
  source 1..18: mol_type = other RNA
cccaatgccatcctggag

SEQ ID NO: 4461 - RNA, 18 nt, synthetic construct
  misc_feature 1..18: note = Antisense oligonucleotide
  modified_base 1..2: mod_base = OTHER; note = misc_feature - bicyclic nucleic acid scaffold modification
  modified_base 17..18: mod_base = OTHER; note = misc_feature - bicyclic nucleic acid scaffold modification
  source 1..18: mol_type = other RNA
cccaatgccatcctggag

SEQ ID NO: 4462 - RNA, 18 nt, synthetic construct
  misc_feature 1..18: note = Antisense oligonucleotide
  modified_base 1..2: mod_base = OTHER; note = misc_feature - bicyclic nucleic acid scaffold modification
  modified_base 9: mod_base = OTHER; note = misc_feature - bicyclic nucleic acid scaffold modification
  modified_base 17..18: mod_base = OTHER; note = misc_feature - bicyclic nucleic acid scaffold modification
  source 1..18: mol_type = other RNA
cccaatgccatcctggag

SEQ ID NO: 4463 - RNA, 18 nt, synthetic construct
  misc_feature 1..18: note = Antisense oligonucleotide
  modified_base 1..2: mod_base = OTHER; note = misc_feature - bicyclic nucleic acid scaffold modification
  modified_base 7: mod_base = OTHER; note = misc_feature - bicyclic nucleic acid scaffold modification
  modified_base 13: mod_base = OTHER; note = misc_feature - bicyclic nucleic acid scaffold modification
  modified_base 17..18: mod_base = OTHER; note = misc_feature - bicyclic nucleic acid scaffold modification
  source 1..18: mol_type = other RNA
cccaatgccatcctggag

SEQ ID NO: 4464 - RNA, 16 nt, synthetic construct
  misc_feature 1..16: note = Antisense oligonucleotide
  modified_base 1: mod_base = OTHER; note = misc_feature - bicyclic nucleic acid scaffold modification
  modified_base 16: mod_base = OTHER; note = misc_feature - bicyclic nucleic acid scaffold modification
  source 1..16: mol_type = other RNA
ctgcccaatgccatcc

SEQ ID NO: 4465 - RNA, 16 nt, synthetic construct
  misc_feature 1..16: note = Antisense oligonucleotide
  modified_base 1: mod_base = OTHER; note = misc_feature - bicyclic nucleic acid scaffold modification
  modified_base 3: mod_base = OTHER; note = misc_feature - bicyclic nucleic acid scaffold modification
  modified_base 16: mod_base = OTHER; note = misc_feature - bicyclic nucleic acid scaffold modification
  source 1..16: mol_type = other RNA
ctgcccaatgccatcc

SEQ ID NO: 4466 - RNA, 16 nt, synthetic construct
  misc_feature 1..16: note = Antisense oligonucleotide
  modified_base 1: mod_base = OTHER; note = misc_feature - bicyclic nucleic acid scaffold modification
  modified_base 10: mod_base = OTHER; note = misc_feature - bicyclic nucleic acid scaffold modification
  modified_base 16: mod_base = OTHER; note = misc_feature - bicyclic nucleic acid scaffold modification
  source 1..16: mol_type = other RNA
ctgcccaatgccatcc

SEQ ID NO: 4467 - RNA, 16 nt, synthetic construct
  misc_feature 1..16: note = Antisense oligonucleotide
  modified_base 1: mod_base = OTHER; note = misc_feature - bicyclic nucleic acid scaffold modification
  modified_base 3: mod_base = OTHER; note = misc_feature - bicyclic nucleic acid scaffold modification
  modified_base 10: mod_base = OTHER; note = misc_feature - bicyclic nucleic acid scaffold modification
  modified_base 16: mod_base = OTHER; note = misc_feature - bicyclic nucleic acid scaffold modification
  source 1..16: mol_type = other RNA
ctgcccaatgccatcc

SEQ ID NO: 4468 - RNA, 16 nt, synthetic construct
  misc_feature 1..16: note = Antisense oligonucleotide
  modified_base 1: mod_base = OTHER; note = misc_feature - bicyclic nucleic acid scaffold modification
  modified_base 6: mod_base = OTHER; note = misc_feature - bicyclic nucleic acid scaffold modification
  modified_base 16: mod_base = OTHER; note = misc_feature - bicyclic nucleic acid scaffold modification
  source 1..16: mol_type = other RNA
ctgcccaatgccatcc

SEQ ID NO: 4469 - RNA, 16 nt, synthetic construct
  misc_feature 1..16: note = Antisense oligonucleotide
  modified_base 1: mod_base = OTHER; note = misc_feature - bicyclic nucleic acid scaffold modification
  modified_base 12: mod_base = OTHER; note = misc_feature - bicyclic nucleic acid scaffold modification
  modified_base 16: mod_base = OTHER; note = misc_feature - bicyclic nucleic acid scaffold modification
  source 1..16: mol_type = other RNA
ctgcccaatgccatcc

SEQ ID NO: 4470 - RNA, 16 nt, synthetic construct
  misc_feature 1..16: note = Antisense oligonucleotide
  modified_base 1: mod_base = OTHER; note = misc_feature - bicyclic nucleic acid scaffold modification
  modified_base 6: mod_base = OTHER; note = misc_feature - bicyclic nucleic acid scaffold modification
  modified_base 12: mod_base = OTHER; note = misc_feature - bicyclic nucleic acid scaffold modification
  modified_base 16: mod_base = OTHER; note = misc_feature - bicyclic nucleic acid scaffold modification
  source 1..16: mol_type = other RNA
ctgcccaatgccatcc

SEQ ID NO: 4471 - RNA, 16 nt, synthetic construct
  misc_feature 1..16: note = Antisense oligonucleotide
  modified_base 1: mod_base = OTHER; note = misc_feature - bicyclic nucleic acid scaffold modification
  modified_base 10: mod_base = OTHER; note = misc_feature - bicyclic nucleic acid scaffold modification
  modified_base 15..16: mod_base = OTHER; note = misc_feature - bicyclic nucleic acid scaffold modification
  source 1..16: mol_type = other RNA
ctgcccaatgccatcc

SEQ ID NO: 4472 - RNA, 16 nt, synthetic construct
  modified_base 2: mod_base = OTHER; note = thymine
  misc_feature 1..16: note = Antisense oligonucleotide
  modified_base 1..2: mod_base = OTHER; note = misc_feature - bicyclic nucleic acid scaffold modification
  modified_base 15..16: mod_base = OTHER; note = misc_feature - bicyclic nucleic acid scaffold modification
  source 1..16: mol_type = other RNA
ctgcccaatgccatcc

SEQ ID NO: 4473 - RNA, 16 nt, synthetic construct
  modified_base 2: mod_base = OTHER; note = thymine
  misc_feature 1..16: note = Antisense oligonucleotide
  modified_base 1..2: mod_base = OTHER; note = misc_feature - bicyclic nucleic acid scaffold modification
  modified_base 6: mod_base = OTHER; note = misc_feature - bicyclic nucleic acid scaffold modification
  modified_base 10: mod_base = OTHER; note = misc_feature - bicyclic nucleic acid scaffold modification
  modified_base 15..16: mod_base = OTHER; note = misc_feature - bicyclic nucleic acid scaffold modification
  source 1..16: mol_type = other RNA
ctgcccaatgccatcc

SEQ ID NO: 4474 - RNA, 16 nt, synthetic construct
  modified_base 2: mod_base = OTHER; note = thymine
  modified_base 14: mod_base = OTHER; note = thymine
  misc_feature 1..16: note = Antisense oligonucleotide
  modified_base 1..2: mod_base = OTHER; note = misc_feature - bicyclic nucleic acid scaffold modification
  modified_base 14..16: mod_base = OTHER; note = misc_feature - bicyclic nucleic acid scaffold modification
  source 1..16: mol_type = other RNA
ctgcccaatgccatcc

SEQ ID NO: 4475 - RNA, 16 nt, synthetic construct
  modified_base 1: mod_base = OTHER; note = thymine
  modified_base 16: mod_base = OTHER; note = thymine
  misc_feature 1..16: note = Antisense oligonucleotide
  modified_base 1: mod_base = OTHER; note = misc_feature - bicyclic nucleic acid scaffold modification
  modified_base 16: mod_base = OTHER; note = misc_feature - bicyclic nucleic acid scaffold modification
  source 1..16: mol_type = other RNA
tgcccaatgccatcct

SEQ ID NO: 4476 - RNA, 16 nt, synthetic construct
  modified_base 1: mod_base = OTHER; note = thymine
  modified_base 16: mod_base = OTHER; note = thymine
  misc_feature 1..16: note = Antisense oligonucleotide
  modified_base 1..2: mod_base = OTHER; note = misc_feature - bicyclic nucleic acid scaffold modification
  modified_base 16: mod_base = OTHER; note = misc_feature - bicyclic nucleic acid scaffold modification
  source 1..16: mol_type = other RNA
tgcccaatgccatcct

SEQ ID NO: 4477 - RNA, 16 nt, synthetic construct
  modified_base 1: mod_base = OTHER; note = thymine
  modified_base 16: mod_base = OTHER; note = thymine
  misc_feature 1..16: note = Antisense oligonucleotide
  modified_base 1: mod_base = OTHER; note = misc_feature - bicyclic nucleic acid scaffold modification
  modified_base 9: mod_base = OTHER; note = misc_feature - bicyclic nucleic acid scaffold modification
  modified_base 16: mod_base = OTHER; note = misc_feature - bicyclic nucleic acid scaffold modification
  source 1..16: mol_type = other RNA
tgcccaatgccatcct

SEQ ID NO: 4478 - RNA, 16 nt, synthetic construct
  modified_base 1: mod_base = OTHER; note = thymine
  modified_base 16: mod_base = OTHER; note = thymine
  misc_feature 1..16: note = Antisense oligonucleotide
  modified_base 1..2: mod_base = OTHER; note = misc_feature - bicyclic nucleic acid scaffold modification
  modified_base 9: mod_base = OTHER; note = misc_feature - bicyclic nucleic acid scaffold modification
  modified_base 16: mod_base = OTHER; note = misc_feature - bicyclic nucleic acid scaffold modification
  source 1..16: mol_type = other RNA
tgcccaatgccatcct

SEQ ID NO: 4479 - RNA, 16 nt, synthetic construct
  modified_base 1: mod_base = OTHER; note = thymine
  modified_base 16: mod_base = OTHER; note = thymine
  misc_feature 1..16: note = Antisense oligonucleotide
  modified_base 1: mod_base = OTHER; note = misc_feature - bicyclic nucleic acid scaffold modification
  modified_base 5: mod_base = OTHER; note = misc_feature - bicyclic nucleic acid scaffold modification
  modified_base 16: mod_base = OTHER; note = misc_feature - bicyclic nucleic acid scaffold modification
  source 1..16: mol_type = other RNA
tgcccaatgccatcct

SEQ ID NO: 4480 - RNA, 16 nt, synthetic construct
  modified_base 1: mod_base = OTHER; note = thymine
  modified_base 16: mod_base = OTHER; note = thymine
  misc_feature 1..16: note = Antisense oligonucleotide
  modified_base 1: mod_base = OTHER; note = misc_feature - bicyclic nucleic acid scaffold modification
  modified_base 11: mod_base = OTHER; note = misc_feature - bicyclic nucleic acid scaffold modification
  modified_base 16: mod_base = OTHER; note = misc_feature - bicyclic nucleic acid scaffold modification
  source 1..16: mol_type = other RNA
tgcccaatgccatcct

SEQ ID NO: 4481 - RNA, 16 nt, synthetic construct
  modified_base 1: mod_base = OTHER; note = thymine
  modified_base 16: mod_base = OTHER; note = thymine
  misc_feature 1..16: note = Antisense oligonucleotide
  modified_base 1: mod_base = OTHER; note = misc_feature - bicyclic nucleic acid scaffold modification
  modified_base 5: mod_base = OTHER; note = misc_feature - bicyclic nucleic acid scaffold modification
  modified_base 11: mod_base = OTHER; note = misc_feature - bicyclic nucleic acid scaffold modification
  modified_base 16: mod_base = OTHER; note = misc_feature - bicyclic nucleic acid scaffold modification
  source 1..16: mol_type = other RNA
tgcccaatgccatcct

SEQ ID NO: 4482 - RNA, 16 nt, synthetic construct
  modified_base 1: mod_base = OTHER; note = thymine
  modified_base 16: mod_base = OTHER; note = thymine
  misc_feature 1..16: note = Antisense oligonucleotide
  modified_base 1: mod_base = OTHER; note = misc_feature - bicyclic nucleic acid scaffold modification
  modified_base 9: mod_base = OTHER; note = misc_feature - bicyclic nucleic acid scaffold modification
  modified_base 15..16: mod_base = OTHER; note = misc_feature - bicyclic nucleic acid scaffold modification
  source 1..16: mol_type = other RNA
tgcccaatgccatcct

SEQ ID NO: 4483 - RNA, 16 nt, synthetic construct
  modified_base 1: mod_base = OTHER; note = thymine
  modified_base 16: mod_base = OTHER; note = thymine
  misc_feature 1..16: note = Antisense oligonucleotide
  modified_base 1..2: mod_base = OTHER; note = misc_feature - bicyclic nucleic acid scaffold modification
  modified_base 15..16: mod_base = OTHER; note = misc_feature - bicyclic nucleic acid scaffold modification
  source 1..16: mol_type = other RNA
tgcccaatgccatcct

SEQ ID NO: 4484 - RNA, 16 nt, synthetic construct
  modified_base 1: mod_base = OTHER; note = thymine
  modified_base 16: mod_base = OTHER; note = thymine
  misc_feature 1..16: note = Antisense oligonucleotide
  modified_base 1..2: mod_base = OTHER; note = misc_feature - bicyclic nucleic acid scaffold modification
  modified_base 5: mod_base = OTHER; note = misc_feature - bicyclic nucleic acid scaffold modification
  modified_base 11: mod_base = OTHER; note = misc_feature - bicyclic nucleic acid scaffold modification
  modified_base 15..16: mod_base = OTHER; note = misc_feature - bicyclic nucleic acid scaffold modification
  source 1..16: mol_type = other RNA
tgcccaatgccatcct

SEQ ID NO: 4485 - RNA, 16 nt, synthetic construct
  misc_feature 1..16: note = Antisense oligonucleotide
  modified_base 1: mod_base = OTHER; note = misc_feature - bicyclic nucleic acid scaffold modification
  modified_base 16: mod_base = OTHER; note = misc_feature - bicyclic nucleic acid scaffold modification
  source 1..16: mol_type = other RNA
gcccaatgccatcctg

SEQ ID NO: 4486 - RNA, 16 nt, synthetic construct
  misc_feature 1..16: note = Antisense oligonucleotide
  modified_base 1: mod_base = OTHER; note = misc_feature - bicyclic nucleic acid scaffold modification
  modified_base 8: mod_base = OTHER; note = misc_feature - bicyclic nucleic acid scaffold modification
  modified_base 16: mod_base = OTHER; note = misc_feature - bicyclic nucleic acid scaffold modification
  source 1..16: mol_type = other RNA
gcccaatgccatcctg

SEQ ID NO: 4487 - RNA, 16 nt, synthetic construct
  misc_feature 1..16: note = Antisense oligonucleotide
  modified_base 1: mod_base = OTHER; note = misc_feature - bicyclic nucleic acid scaffold modification
  modified_base 14: mod_base = OTHER; note = misc_feature - bicyclic nucleic acid scaffold modification
  modified_base 16: mod_base = OTHER; note = misc_feature - bicyclic nucleic acid scaffold modification
  source 1..16: mol_type = other RNA
gcccaatgccatcctg

SEQ ID NO: 4488 - RNA, 16 nt, synthetic construct
  misc_feature 1..16: note = Antisense oligonucleotide
  modified_base 1: mod_base = OTHER; note = misc_feature - bicyclic nucleic acid scaffold modification
  modified_base 10: mod_base = OTHER; note = misc_feature - bicyclic nucleic acid scaffold modification
  modified_base 16: mod_base = OTHER; note = misc_feature - bicyclic nucleic acid scaffold modification
  source 1..16: mol_type = other RNA
gcccaatgccatcctg

SEQ ID NO: 4489 - RNA, 16 nt, synthetic construct
  misc_feature 1..16: note = Antisense oligonucleotide
  modified_base 1: mod_base = OTHER; note = misc_feature - bicyclic nucleic acid scaffold modification
  modified_base 4: mod_base = OTHER; note = misc_feature - bicyclic nucleic acid scaffold modification
  modified_base 16: mod_base = OTHER; note = misc_feature - bicyclic nucleic acid scaffold modification
  source 1..16: mol_type = other RNA
gcccaatgccatcctg

SEQ ID NO: 4490 - RNA, 16 nt, synthetic construct
  misc_feature 1..16: note = Antisense oligonucleotide
  modified_base 1: mod_base = OTHER; note = misc_feature - bicyclic nucleic acid scaffold modification
  modified_base 4: mod_base = OTHER; note = misc_feature - bicyclic nucleic acid scaffold modification
  modified_base 10: mod_base = OTHER; note = misc_feature - bicyclic nucleic acid scaffold modification
  modified_base 16: mod_base = OTHER; note = misc_feature - bicyclic nucleic acid scaffold modification
  source 1..16: mol_type = other RNA
gcccaatgccatcctg

SEQ ID NO: 4491 - RNA, 16 nt, synthetic construct
  misc_feature 1..16: note = Antisense oligonucleotide
  modified_base 1: mod_base = OTHER; note = misc_feature - bicyclic nucleic acid scaffold modification
  modified_base 4: mod_base = OTHER; note = misc_feature - bicyclic nucleic acid scaffold modification
  modified_base 14: mod_base = OTHER; note = misc_feature - bicyclic nucleic acid scaffold modification
  modified_base 16: mod_base = OTHER; note = misc_feature - bicyclic nucleic acid scaffold modification
  source 1..16: mol_type = other RNA
gcccaatgccatcctg

SEQ ID NO: 4492 - RNA, 16 nt, synthetic construct
  misc_feature 1..16: note = Antisense oligonucleotide
  modified_base 1: mod_base = OTHER; note = misc_feature - bicyclic nucleic acid scaffold modification
  modified_base 10: mod_base = OTHER; note = misc_feature - bicyclic nucleic acid scaffold modification
  modified_base 14: mod_base = OTHER; note = misc_feature - bicyclic nucleic acid scaffold modification
  modified_base 16: mod_base = OTHER; note = misc_feature - bicyclic nucleic acid scaffold modification
  source 1..16: mol_type = other RNA
gcccaatgccatcctg

SEQ ID NO: 4493 - RNA, 16 nt, synthetic construct
  modified_base 15: mod_base = OTHER; note = thymine
  misc_feature 1..16: note = Antisense oligonucleotide
  modified_base 1..2: mod_base = OTHER; note = misc_feature - bicyclic nucleic acid scaffold modification
  modified_base 15..16: mod_base = OTHER; note = misc_feature - bicyclic nucleic acid scaffold modification
  source 1..16: mol_type = other RNA
gcccaatgccatcctg

SEQ ID NO: 4494 - RNA, 16 nt, synthetic construct
  modified_base 15: mod_base = OTHER; note = thymine
  misc_feature 1..16: note = Antisense oligonucleotide
  modified_base 1..2: mod_base = OTHER; note = misc_feature - bicyclic nucleic acid scaffold modification
  modified_base 8: mod_base = OTHER; note = misc_feature - bicyclic nucleic acid scaffold modification
  modified_base 15..16: mod_base = OTHER; note = misc_feature - bicyclic nucleic acid scaffold modification
  source 1..16: mol_type = other RNA
gcccaatgccatcctg

SEQ ID NO: 4495 - RNA, 16 nt, synthetic construct
  modified_base 15: mod_base = OTHER; note = thymine
  misc_feature 1..16: note = Antisense oligonucleotide
  modified_base 1..2: mod_base = OTHER; note = misc_feature - bicyclic nucleic acid scaffold modification
  modified_base 8: mod_base = OTHER; note = misc_feature - bicyclic nucleic acid scaffold modification
  modified_base 13: mod_base = OTHER; note = misc_feature - bicyclic nucleic acid scaffold modification
  modified_base 15..16: mod_base = OTHER; note = misc_feature - bicyclic nucleic acid scaffold modification
  source 1..16: mol_type = other RNA
gcccaatgccatcctg

SEQ ID NO: 4496 - RNA, 16 nt, synthetic construct
  misc_feature 1..16: note = Antisense oligonucleotide
  modified_base 1: mod_base = OTHER; note = misc_feature - bicyclic nucleic acid scaffold modification
  modified_base 16: mod_base = OTHER; note = misc_feature - bicyclic nucleic acid scaffold modification
  source 1..16: mol_type = other RNA
cccaatgccatcctgg

SEQ ID NO: 4497 - RNA, 16 nt, synthetic construct
  misc_feature 1..16: note = Antisense oligonucleotide
  modified_base 1: mod_base = OTHER; note = misc_feature - bicyclic nucleic acid scaffold modification
  modified_base 7: mod_base = OTHER; note = misc_feature - bicyclic nucleic acid scaffold modification
  modified_base 16: mod_base = OTHER; note = misc_feature - bicyclic nucleic acid scaffold modification
  source 1..16: mol_type = other RNA
cccaatgccatcctgg

SEQ ID NO: 4498 - RNA, 16 nt, synthetic construct
  misc_feature 1..16: note = Antisense oligonucleotide
  modified_base 1: mod_base = OTHER; note = misc_feature - bicyclic nucleic acid scaffold modification
  modified_base 7: mod_base = OTHER; note = misc_feature - bicyclic nucleic acid scaffold modification
  modified_base 15..16: mod_base = OTHER; note = misc_feature - bicyclic nucleic acid scaffold modification
  source 1..16: mol_type = other RNA
cccaatgccatcctgg

SEQ ID NO: 4499 - RNA, 16 nt, synthetic construct
  misc_feature 1..16: note = Antisense oligonucleotide
  modified_base 1: mod_base = OTHER; note = misc_feature - bicyclic nucleic acid scaffold modification
  modified_base 13: mod_base = OTHER; note = misc_feature - bicyclic nucleic acid scaffold modification
  modified_base 16: mod_base = OTHER; note = misc_feature - bicyclic nucleic acid scaffold modification
  source 1..16: mol_type = other RNA
cccaatgccatcctgg

SEQ ID NO: 4500 - RNA, 16 nt, synthetic construct
  misc_feature 1..16: note = Antisense oligonucleotide
  modified_base 1: mod_base = OTHER; note = misc_feature - bicyclic nucleic acid scaffold modification
  modified_base 9: mod_base = OTHER; note = misc_feature - bicyclic nucleic acid scaffold modification
  modified_base 16: mod_base = OTHER; note = misc_feature - bicyclic nucleic acid scaffold modification
  source 1..16: mol_type = other RNA
cccaatgccatcctgg

SEQ ID NO: 4501 - RNA, 16 nt, synthetic construct
  misc_feature 1..16: note = Antisense oligonucleotide
  modified_base 1: mod_base = OTHER; note = misc_feature - bicyclic nucleic acid scaffold modification
  modified_base 3: mod_base = OTHER; note = misc_feature - bicyclic nucleic acid scaffold modification
  modified_base 9: mod_base = OTHER; note = misc_feature - bicyclic nucleic acid scaffold modification
  modified_base 16: mod_base = OTHER; note = misc_feature - bicyclic nucleic acid scaffold modification
  source 1..16: mol_type = other RNA
cccaatgccatcctgg

SEQ ID NO: 4502 - RNA, 16 nt, synthetic construct
  misc_feature 1..16: note = Antisense oligonucleotide
  modified_base 1: mod_base = OTHER; note = misc_feature - bicyclic nucleic acid scaffold modification
  modified_base 3: mod_base = OTHER; note = misc_feature - bicyclic nucleic acid scaffold modification
  modified_base 16: mod_base = OTHER; note = misc_feature - bicyclic nucleic acid scaffold modification
  source 1..16: mol_type = other RNA
cccaatgccatcctgg

SEQ ID NO: 4503 - RNA, 16 nt, synthetic construct
  misc_feature 1..16: note = Antisense oligonucleotide
  modified_base 1: mod_base = OTHER; note = misc_feature - bicyclic nucleic acid scaffold modification
  modified_base 9: mod_base = OTHER; note = misc_feature - bicyclic nucleic acid scaffold modification
  modified_base 13: mod_base = OTHER; note = misc_feature - bicyclic nucleic acid scaffold modification
  modified_base 16: mod_base = OTHER; note = misc_feature - bicyclic nucleic acid scaffold modification
  source 1..16: mol_type = other RNA
cccaatgccatcctgg

SEQ ID NO: 4504 - RNA, 16 nt, synthetic construct
  misc_feature 1..16: note = Antisense oligonucleotide
  modified_base 1..2: mod_base = OTHER; note = misc_feature - bicyclic nucleic acid scaffold modification
  modified_base 15..16: mod_base = OTHER; note = misc_feature - bicyclic nucleic acid scaffold modification
  source 1..16: mol_type = other RNA
cccaatgccatcctgg

SEQ ID NO: 4505 - RNA, 16 nt, synthetic construct
  misc_feature 1..16: note = Antisense oligonucleotide
  modified_base 1..2: mod_base = OTHER; note = misc_feature - bicyclic nucleic acid scaffold modification
  modified_base 7: mod_base = OTHER; note = misc_feature - bicyclic nucleic acid scaffold modification
  modified_base 15..16: mod_base = OTHER; note = misc_feature - bicyclic nucleic acid scaffold modification
  source 1..16: mol_type = other RNA
cccaatgccatcctgg

SEQ ID NO: 4506 - RNA, 16 nt, synthetic construct
  misc_feature 1..16: note = Antisense oligonucleotide
  modified_base 1..2: mod_base = OTHER; note = misc_feature - bicyclic nucleic acid scaffold modification
  modified_base 9: mod_base = OTHER; note = misc_feature - bicyclic nucleic acid scaffold modification
  modified_base 15..16: mod_base = OTHER; note = misc_feature - bicyclic nucleic acid scaffold modification
  source 1..16: mol_type = other RNA
cccaatgccatcctgg

SEQ ID NO: 4507 - RNA, 16 nt, synthetic construct
  misc_feature 1..16: note = Antisense oligonucleotide
  modified_base 1: mod_base = OTHER; note = misc_feature - bicyclic nucleic acid scaffold modification
  modified_base 16: mod_base = OTHER; note = misc_feature - bicyclic nucleic acid scaffold modification
  source 1..16: mol_type = other RNA
ccaatgccatcctgga

SEQ ID NO: 4508 - RNA, 16 nt, synthetic construct
  misc_feature 1..16: note = Antisense oligonucleotide
  modified_base 1: mod_base = OTHER; note = misc_feature - bicyclic nucleic acid scaffold modification
  modified_base 6: mod_base = OTHER; note = misc_feature - bicyclic nucleic acid scaffold modification
  modified_base 16: mod_base = OTHER; note = misc_feature - bicyclic nucleic acid scaffold modification
  source 1..16: mol_type = other RNA
ccaatgccatcctgga

SEQ ID NO: 4509 - RNA, 16 nt, synthetic construct
  misc_feature 1..16: note = Antisense oligonucleotide
  modified_base 1: mod_base = OTHER; note = misc_feature - bicyclic nucleic acid scaffold modification
  modified_base 14: mod_base = OTHER; note = misc_feature - bicyclic nucleic acid scaffold modification
  modified_base 16: mod_base = OTHER; note = misc_feature - bicyclic nucleic acid scaffold modification
  source 1..16: mol_type = other RNA
ccaatgccatcctgga

SEQ ID NO: 4510 - RNA, 16 nt, synthetic construct
  misc_feature 1..16: note = Antisense oligonucleotide
  modified_base 1: mod_base = OTHER; note = misc_feature - bicyclic nucleic acid scaffold modification
  modified_base 6: mod_base = OTHER; note = misc_feature - bicyclic nucleic acid scaffold modification
  modified_base 14: mod_base = OTHER; note = misc_feature - bicyclic nucleic acid scaffold modification
  modified_base 16: mod_base = OTHER; note = misc_feature - bicyclic nucleic acid scaffold modification
  source 1..16: mol_type = other RNA
ccaatgccatcctgga

SEQ ID NO: 4511 - RNA, 16 nt, synthetic construct
  misc_feature 1..16: note = Antisense oligonucleotide
  modified_base 1: mod_base = OTHER; note = misc_feature - bicyclic nucleic acid scaffold modification
  modified_base 12: mod_base = OTHER; note = misc_feature - bicyclic nucleic acid scaffold modification
  modified_base 16: mod_base = OTHER; note = misc_feature - bicyclic nucleic acid scaffold modification
  source 1..16: mol_type = other RNA
ccaatgccatcctgga

SEQ ID NO: 4512 - RNA, 16 nt, synthetic construct
  misc_feature 1..16: note = Antisense oligonucleotide
  modified_base 1: mod_base = OTHER; note = misc_feature - bicyclic nucleic acid scaffold modification
  modified_base 8: mod_base = OTHER; note = misc_feature - bicyclic nucleic acid scaffold modification
  modified_base 16: mod_base = OTHER; note = misc_feature - bicyclic nucleic acid scaffold modification
  source 1..16: mol_type = other RNA
ccaatgccatcctgga

SEQ ID NO: 4513 - RNA, 16 nt, synthetic construct
  misc_feature 1..16: note = Antisense oligonucleotide
  modified_base 1: mod_base = OTHER; note = misc_feature - bicyclic nucleic acid scaffold modification
  modified_base 8: mod_base = OTHER; note = misc_feature - bicyclic nucleic acid scaffold modification
  modified_base 12: mod_base = OTHER; note = misc_feature - bicyclic nucleic acid scaffold modification
  modified_base 16: mod_base = OTHER; note = misc_feature - bicyclic nucleic acid scaffold modification
  source 1..16: mol_type = other RNA
ccaatgccatcctgga

SEQ ID NO: 4514 - RNA, 16 nt, synthetic construct
  misc_feature 1..16: note = Antisense oligonucleotide
  modified_base 1: mod_base = OTHER; note = misc_feature - bicyclic nucleic acid scaffold modification
  modified_base 6: mod_base = OTHER; note = misc_feature - bicyclic nucleic acid scaffold modification
  modified_base 15..16: mod_base = OTHER; note = misc_feature - bicyclic nucleic acid scaffold modification
  source 1..16: mol_type = other RNA
ccaatgccatcctgga

SEQ ID NO: 4515 - RNA, 16 nt, synthetic construct
  misc_feature 1..16: note = Antisense oligonucleotide
  modified_base 1..2: mod_base = OTHER; note = misc_feature - bicyclic nucleic acid scaffold modification
  modified_base 15..16: mod_base = OTHER; note = misc_feature - bicyclic nucleic acid scaffold modification
  source 1..16: mol_type = other RNA
ccaatgccatcctgga

SEQ ID NO: 4516 - RNA, 16 nt, synthetic construct
  misc_feature 1..16: note = Antisense oligonucleotide
  modified_base 1..2: mod_base = OTHER; note = misc_feature - bicyclic nucleic acid scaffold modification
  modified_base 6: mod_base = OTHER; note = misc_feature - bicyclic nucleic acid scaffold modification
  modified_base 11: mod_base = OTHER; note = misc_feature - bicyclic nucleic acid scaffold modification
  modified_base 15..16: mod_base = OTHER; note = misc_feature - bicyclic nucleic acid scaffold modification
  source 1..16: mol_type = other RNA
ccaatgccatcctgga

SEQ ID NO: 4517 - RNA, 16 nt, synthetic construct
  misc_feature 1..16: note = Antisense oligonucleotide
  modified_base 1: mod_base = OTHER; note = misc_feature - bicyclic nucleic acid scaffold modification
  modified_base 16: mod_base = OTHER; note = misc_feature - bicyclic nucleic acid scaffold modification
  source 1..16: mol_type = other RNA
caatgccatcctggag

SEQ ID NO: 4518 - RNA, 16 nt, synthetic construct
  misc_feature 1..16: note = Antisense oligonucleotide
  modified_base 1: mod_base = OTHER; note = misc_feature - bicyclic nucleic acid scaffold modification
  modified_base 5: mod_base = OTHER; note = misc_feature - bicyclic nucleic acid scaffold modification
  modified_base 16: mod_base = OTHER; note = misc_feature - bicyclic nucleic acid scaffold modification
  source 1..16: mol_type = other RNA
caatgccatcctggag

SEQ ID NO: 4519 - RNA, 16 nt, synthetic construct
  misc_feature 1..16: note = Antisense oligonucleotide
  modified_base 1: mod_base = OTHER; note = misc_feature - bicyclic nucleic acid scaffold modification
  modified_base 13: mod_base = OTHER; note = misc_feature - bicyclic nucleic acid scaffold modification
  modified_base 16: mod_base = OTHER; note = misc_feature - bicyclic nucleic acid scaffold modification
  source 1..16: mol_type = other RNA
caatgccatcctggag

SEQ ID NO: 4520 - RNA, 16 nt, synthetic construct
  misc_feature 1..16: note = Antisense oligonucleotide
  modified_base 1: mod_base = OTHER; note = misc_feature - bicyclic nucleic acid scaffold modification
  modified_base 5: mod_base = OTHER; note = misc_feature - bicyclic nucleic acid scaffold modification
  modified_base 14: mod_base = OTHER; note = misc_feature - bicyclic nucleic acid scaffold modification
  modified_base 16: mod_base = OTHER; note = misc_feature - bicyclic nucleic acid scaffold modification
  source 1..16: mol_type = other RNA
caatgccatcctggag

SEQ ID NO: 4521 - RNA, 16 nt, synthetic construct
  misc_feature 1..16: note = Antisense oligonucleotide
  modified_base 1: mod_base = OTHER; note = misc_feature - bicyclic nucleic acid scaffold modification
  modified_base 5: mod_base = OTHER; note = misc_feature - bicyclic nucleic acid scaffold modification
  modified_base 13: mod_base = OTHER; note = misc_feature - bicyclic nucleic acid scaffold modification
  modified_base 16: mod_base = OTHER; note = misc_feature - bicyclic nucleic acid scaffold modification
  source 1..16: mol_type = other RNA
caatgccatcctggag

SEQ ID NO: 4522 - RNA, 16 nt, synthetic construct
  misc_feature 1..16: note = Antisense oligonucleotide
  modified_base 1: mod_base = OTHER; note = misc_feature - bicyclic nucleic acid scaffold modification
  modified_base 11: mod_base = OTHER; note = misc_feature - bicyclic nucleic acid scaffold modification
  modified_base 16: mod_base = OTHER; note = misc_feature - bicyclic nucleic acid scaffold modification
  source 1..16: mol_type = other RNA
caatgccatcctggag

SEQ ID NO: 4523 - RNA, 16 nt, synthetic construct
  misc_feature 1..16: note = Antisense oligonucleotide
  modified_base 1: mod_base = OTHER; note = misc_feature - bicyclic nucleic acid scaffold modification
  modified_base 7: mod_base = OTHER; note = misc_feature - bicyclic nucleic acid scaffold modification
  modified_base 16: mod_base = OTHER; note = misc_feature - bicyclic nucleic acid scaffold modification
  source 1..16: mol_type = other RNA
caatgccatcctggag

SEQ ID NO: 4524 - RNA, 16 nt, synthetic construct
  misc_feature 1..16: note = Antisense oligonucleotide
  modified_base 1: mod_base = OTHER; note = misc_feature - bicyclic nucleic acid scaffold modification
  modified_base 7: mod_base = OTHER; note = misc_feature - bicyclic nucleic acid scaffold modification
  modified_base 11: mod_base = OTHER; note = misc_feature - bicyclic nucleic acid scaffold modification
  modified_base 16: mod_base = OTHER; note = misc_feature - bicyclic nucleic acid scaffold modification
  source 1..16: mol_type = other RNA
caatgccatcctggag

SEQ ID NO: 4525 - RNA, 16 nt, synthetic construct
  misc_feature 1..16: note = Antisense oligonucleotide
  modified_base 1..2: mod_base = OTHER; note = misc_feature - bicyclic nucleic acid scaffold modification
  modified_base 15..16: mod_base = OTHER; note = misc_feature - bicyclic nucleic acid scaffold modification
  source 1..16: mol_type = other RNA
caatgccatcctggag

SEQ ID NO: 4526 - RNA, 16 nt, synthetic construct
  misc_feature 1..16: note = Antisense oligonucleotide
  modified_base 1..2: mod_base = OTHER; note = misc_feature - bicyclic nucleic acid scaffold modification
  modified_base 10: mod_base = OTHER; note = misc_feature - bicyclic nucleic acid scaffold modification
  modified_base 15..16: mod_base = OTHER; note = misc_feature - bicyclic nucleic acid scaffold modification
  source 1..16: mol_type = other RNA
caatgccatcctggag

SEQ ID NO: 4527 - RNA, 16 nt, synthetic construct
  misc_feature 1..16: note = Antisense oligonucleotide
  modified_base 1..2: mod_base = OTHER; note = misc_feature - bicyclic nucleic acid scaffold modification
  modified_base 5: mod_base = OTHER; note = misc_feature - bicyclic nucleic acid scaffold modification
  modified_base 13: mod_base = OTHER; note = misc_feature - bicyclic nucleic acid scaffold modification
  modified_base 15..16: mod_base = OTHER; note = misc_feature - bicyclic nucleic acid scaffold modification
  source 1..16: mol_type = other RNA
caatgccatcctggag

SEQ ID NO: 4528 - RNA, 22 nt, synthetic construct
  misc_feature 1..22: note = Antisense oligonucleotide
  source 1..22: mol_type = other RNA
  modified_base 1: mod_base = OTHER; note = misc_feature - locked thymine bicyclic nucleic acid scaffold modification phosphorothioate
  modified_base 2: mod_base = OTHER; note = misc_feature - locked 5-methylcytosine bicyclic nucleic acid scaffold modification phosphorothioate
  modified_base 3: mod_base = OTHER; note = 2'-O-methyl adenosine phosphorothioate
  modified_base 4: mod_base = OTHER; note = 2'-O-methyl adenosine phosphorothioate
  modified_base 5: mod_base = OTHER; note = 2'-O-methyl guanosine phosphorothioate
  modified_base 6: mod_base = OTHER; note = 2'-O-methyl guanosine phosphorothioate
  modified_base 7: mod_base = OTHER; note = 2'-O-methyl adenosine phosphorothioate
  modified_base 8: mod_base = OTHER; note = 2'-O-methyl adenosine phosphorothioate
  modified_base 9: mod_base = OTHER; note = 2'-O-methyl guanosine phosphorothioate
  modified_base 10: mod_base = OTHER; note = 2'-O-methyl adenosine phosphorothioate
  modified_base 11: mod_base = OTHER; note = 2'-O-methyl uridine phosphorothioate
  modified_base 12: mod_base = OTHER; note = 2'-O-methyl guanosine phosphorothioate
  modified_base 13: mod_base = OTHER; note = 2'-O-methyl guanosine phosphorothioate
  modified_base 14: mod_base = OTHER; note = 5-methylcytosine phosphorothioate
  modified_base 15: mod_base = OTHER; note = 2'-O-methyl adenosine phosphorothioate
  modified_base 16: mod_base = OTHER; note = 2'-O-methyl uridine phosphorothioate
  modified_base 17: mod_base = OTHER; note = 2'-O-methyl uridine phosphorothioate
  modified_base 18: mod_base = OTHER; note = 2'-O-methyl uridine phosphorothioate
  modified_base 19: mod_base = OTHER; note = 5-methylcytosine phosphorothioate
  modified_base 20: mod_base = OTHER; note = 2'-O-methyl uridine phosphorothioate
  modified_base 21: mod_base = OTHER; note = 2'-O-methyl adenosine phosphorothioate
  modified_base 22: mod_base = OTHER; note = misc_feature - locked bicyclic nucleic acid scaffold modification
tcaaggaagatggcatttctag

SEQ ID NO: 4529 - RNA, 22 nt, synthetic construct
  modified_base 1: mod_base = OTHER; note = thymine
  misc_feature 1..22: note = Antisense oligonucleotide
  modified_base 1..2: mod_base = OTHER; note = misc_feature - bicyclic nucleic acid scaffold modification
  modified_base 10: mod_base = OTHER; note = misc_feature - bicyclic nucleic acid scaffold modification
  modified_base 22: mod_base = OTHER; note = misc_feature - bicyclic nucleic acid scaffold modification
  source 1..22: mol_type = other RNA
tcaaggaagatggcatttctag

SEQ ID NO: 4530 - RNA, 22 nt, synthetic construct
  modified_base 1: mod_base = OTHER; note = thymine
  misc_feature 1..22: note = Antisense oligonucleotide
  modified_base 1..2: mod_base = OTHER; note = misc_feature - bicyclic nucleic acid scaffold modification
  modified_base 10: mod_base = OTHER; note = misc_feature - bicyclic nucleic acid scaffold modification
  modified_base 15: mod_base = OTHER; note = misc_feature - bicyclic nucleic acid scaffold modification
  modified_base 22: mod_base = OTHER; note = misc_feature - bicyclic nucleic acid scaffold modification
  source 1..22: mol_type = other RNA
tcaaggaagatggcatttctag

SEQ ID NO: 4531 - RNA, 22 nt, synthetic construct
  misc_feature 1..22: note = Antisense oligonucleotide
  source 1..22: mol_type = other RNA
  modified_base 1: mod_base = OTHER; note = misc_feature - locked thymine bicyclic nucleic acid scaffold modification phosphorothioate
  modified_base 2: mod_base = OTHER; note = misc_feature - locked 5-methylcytosine bicyclic nucleic acid scaffold modification phosphorothioate
  modified_base 3: mod_base = OTHER; note = 2'-O-methyl adenosine phosphorothioate
  modified_base 4: mod_base = OTHER; note = 2'-O-methyl adenosine phosphorothioate
  modified_base 5: mod_base = OTHER; note = 2'-O-methyl guanosine phosphorothioate
  modified_base 6: mod_base = OTHER; note = 2'-O-methyl guanosine phosphorothioate
  modified_base 7: mod_base = OTHER; note = 2'-O-methyl adenosine phosphorothioate
  modified_base 8: mod_base = OTHER; note = 2'-O-methyl adenosine phosphorothioate
  modified_base 9: mod_base = OTHER; note = 2'-O-methyl guanosine phosphorothioate
  modified_base 10: mod_base = OTHER; note = 2'-O-methyl adenosine phosphorothioate
  modified_base 11: mod_base = OTHER; note = 2'-O-methyl uridine phosphorothioate
  modified_base 12: mod_base = OTHER; note = 2'-O-methyl guanosine phosphorothioate
  modified_base 13: mod_base = OTHER; note = misc_feature - locked bicyclic nucleic acid scaffold modification phosphorothioate
  modified_base 14: mod_base = OTHER; note = 5-methylcytosine phosphorothioate
  modified_base 15: mod_base = OTHER; note = 2'-O-methyl adenosine phosphorothioate
  modified_base 16: mod_base = OTHER; note = 2'-O-methyl uridine phosphorothioate
  modified_base 17: mod_base = OTHER; note = 2'-O-methyl uridine phosphorothioate
  modified_base 18: mod_base = OTHER; note = 2'-O-methyl uridine phosphorothioate
  modified_base 19: mod_base = OTHER; note = 5-methylcytosine phosphorothioate
  modified_base 20: mod_base = OTHER; note = 2'-O-methyl uridine phosphorothioate
  modified_base 21: mod_base = OTHER; note = 2'-O-methyl adenosine phosphorothioate
  modified_base 22: mod_base = OTHER; note = misc_feature - locked bicyclic nucleic acid scaffold modification
tcaaggaagatggcatttctag

SEQ ID NO: 4532 - RNA, 22 nt, synthetic construct
  misc_feature 1..22: note = Antisense oligonucleotide
  source 1..22: mol_type = other RNA
  modified_base 1: mod_base = OTHER; note = misc_feature - locked thymine bicyclic nucleic acid scaffold modification phosphorothioate
  modified_base 2: mod_base = OTHER; note = misc_feature - locked 5-methylcytosine bicyclic nucleic acid scaffold modification phosphorothioate
  modified_base 3: mod_base = OTHER; note = 2'-O-methyl adenosine phosphorothioate
  modified_base 4: mod_base = OTHER; note = 2'-O-methyl adenosine phosphorothioate
  modified_base 5: mod_base = OTHER; note = 2'-O-methyl guanosine phosphorothioate
  modified_base 6: mod_base = OTHER; note = 2'-O-methyl guanosine phosphorothioate
  modified_base 7: mod_base = OTHER; note = 2'-O-methyl adenosine phosphorothioate
  modified_base 8: mod_base = OTHER; note = 2'-O-methyl adenosine phosphorothioate
  modified_base 9: mod_base = OTHER; note = misc_feature - locked bicyclic nucleic acid scaffold modification phosphorothioate
  modified_base 10: mod_base = OTHER; note = 2'-O-methyl adenosine phosphorothioate
  modified_base 11: mod_base = OTHER; note = 2'-O-methyl uridine phosphorothioate
  modified_base 12: mod_base = OTHER; note = 2'-O-methyl guanosine phosphorothioate
  modified_base 13: mod_base = OTHER; note = 2'-O-methyl guanosine phosphorothioate
  modified_base 14: mod_base = OTHER; note = 5-methylcytosine phosphorothioate
  modified_base 15: mod_base = OTHER; note = 2'-O-methyl adenosine phosphorothioate
  modified_base 16: mod_base = OTHER; note = 2'-O-methyl uridine phosphorothioate
  modified_base 17: mod_base = OTHER; note = 2'-O-methyl uridine phosphorothioate
  modified_base 18: mod_base = OTHER; note = 2'-O-methyl uridine phosphorothioate
  modified_base 19: mod_base = OTHER; note = 5-methylcytosine phosphorothioate
  modified_base 20: mod_base = OTHER; note = 2'-O-methyl uridine phosphorothioate
  modified_base 21: mod_base = OTHER; note = 2'-O-methyl adenosine phosphorothioate
  modified_base 22: mod_base = OTHER; note = misc_feature - locked bicyclic nucleic acid scaffold modification
tcaaggaagatggcatttctag

SEQ ID NO: 4533 - RNA, 22 nt, synthetic construct
  misc_feature 1..22: note = Antisense oligonucleotide
  source 1..22: mol_type = other RNA
  modified_base 1: mod_base = OTHER; note = misc_feature - locked thymine bicyclic nucleic acid scaffold modification phosphorothioate
  modified_base 2: mod_base = OTHER; note = misc_feature - locked 5-methylcytosine bicyclic nucleic acid scaffold modification phosphorothioate
  modified_base 3: mod_base = OTHER; note = 2'-O-methyl adenosine phosphorothioate
  modified_base 4: mod_base = OTHER; note = 2'-O-methyl adenosine phosphorothioate
  modified_base 5: mod_base = OTHER; note = 2'-O-methyl guanosine phosphorothioate
  modified_base 6: mod_base = OTHER; note = 2'-O-methyl guanosine phosphorothioate
  modified_base 7: mod_base = OTHER; note = 2'-O-methyl adenosine phosphorothioate
  modified_base 8: mod_base = OTHER; note = 2'-O-methyl adenosine phosphorothioate
  modified_base 9: mod_base = OTHER; note = misc_feature - locked bicyclic nucleic acid scaffold modification phosphorothioate
  modified_base 10: mod_base = OTHER; note = 2'-O-methyl adenosine phosphorothioate
  modified_base 11: mod_base = OTHER; note = 2'-O-methyl uridine phosphorothioate
  modified_base 12: mod_base = OTHER; note = 2'-O-methyl guanosine phosphorothioate
  modified_base 13: mod_base = OTHER; note = misc_feature - locked bicyclic nucleic acid scaffold modification phosphorothioate
  modified_base 14: mod_base = OTHER; note = 5-methylcytosine phosphorothioate
  modified_base 15: mod_base = OTHER; note = 2'-O-methyl adenosine phosphorothioate
  modified_base 16: mod_base = OTHER; note = 2'-O-methyl uridine phosphorothioate
  modified_base 17: mod_base = OTHER; note = 2'-O-methyl uridine phosphorothioate
  modified_base 18: mod_base = OTHER; note = 2'-O-methyl uridine phosphorothioate
  modified_base 19: mod_base = OTHER; note = 5-methylcytosine phosphorothioate
  modified_base 20: mod_base = OTHER; note = 2'-O-methyl uridine phosphorothioate
  modified_base 21: mod_base = OTHER; note = 2'-O-methyl adenosine phosphorothioate
  modified_base 22: mod_base = OTHER; note = misc_feature - locked bicyclic nucleic acid scaffold modification
tcaaggaagatggcatttctag

SEQ ID NO: 4534 - RNA, 22 nt, synthetic construct
  modified_base 1: mod_base = OTHER; note = thymine
  misc_feature 1..22: note = Antisense oligonucleotide
  modified_base 1..2: mod_base = OTHER; note = misc_feature - bicyclic nucleic acid scaffold modification
  modified_base 5: mod_base = OTHER; note = misc_feature - bicyclic nucleic acid scaffold modification
  modified_base 9: mod_base = OTHER; note = misc_feature - bicyclic nucleic acid scaffold modification
  modified_base 13: mod_base = OTHER; note = misc_feature - bicyclic nucleic acid scaffold modification
  modified_base 22: mod_base = OTHER; note = misc_feature - bicyclic nucleic acid scaffold modification
  source 1..22: mol_type = other RNA
tcaaggaagatggcatttctag

SEQ ID NO: 4535 - RNA, 20 nt, synthetic construct
  misc_feature 1..20: note = Antisense oligonucleotide
  source 1..20: mol_type = other RNA
  modified_base 1: mod_base = OTHER; note = misc_feature - locked thymine bicyclic nucleic acid scaffold modification phosphorothioate
  modified_base 2: mod_base = OTHER; note = misc_feature - locked 5-methylcytosine bicyclic nucleic acid scaffold modification phosphorothioate
  modified_base 3: mod_base = OTHER; note = 2'-O-methyl adenosine phosphorothioate
  modified_base 4: mod_base = OTHER; note = 2'-O-methyl adenosine phosphorothioate
  modified_base 5: mod_base = OTHER; note = 2'-O-methyl guanosine phosphorothioate
  modified_base 6: mod_base = OTHER; note = 2'-O-methyl guanosine phosphorothioate
  modified_base 7: mod_base = OTHER; note = 2'-O-methyl adenosine phosphorothioate
  modified_base 8: mod_base = OTHER; note = 2'-O-methyl adenosine phosphorothioate
  modified_base 9: mod_base = OTHER; note = 2'-O-methyl guanosine phosphorothioate
  modified_base 10: mod_base = OTHER; note = 2'-O-methyl adenosine phosphorothioate
  modified_base 11: mod_base = OTHER; note = 2'-O-methyl uridine phosphorothioate
  modified_base 12: mod_base = OTHER; note = 2'-O-methyl guanosine phosphorothioate
  modified_base 13: mod_base = OTHER; note = 2'-O-methyl guanosine phosphorothioate
  modified_base 14: mod_base = OTHER; note = 5-methylcytosine phosphorothioate
  modified_base 15: mod_base = OTHER; note = 2'-O-methyl adenosine phosphorothioate
  modified_base 16: mod_base = OTHER; note = 2'-O-methyl uridine phosphorothioate
  modified_base 17: mod_base = OTHER; note = 2'-O-methyl uridine phosphorothioate
  modified_base 18: mod_base = OTHER; note = 2'-O-methyl uridine phosphorothioate
  modified_base 19: mod_base = OTHER; note = 5-methylcytosine phosphorothioate
  modified_base 20: mod_base = OTHER; note = misc_feature - locked thymine bicyclic nucleic acid scaffold modification
tcaaggaagatggcatttct

SEQ ID NO: 4536 - RNA, 20 nt, synthetic construct
  modified_base 1: mod_base = OTHER; note = thymine
  modified_base 20: mod_base = OTHER; note = thymine
  misc_feature 1..20: note = Antisense oligonucleotide
  modified_base 1..2: mod_base = OTHER; note = misc_feature - bicyclic nucleic acid scaffold modification
  modified_base 10: mod_base = OTHER; note = misc_feature - bicyclic nucleic acid scaffold modification
  modified_base 20: mod_base = OTHER; note = misc_feature - bicyclic nucleic acid scaffold modification
  source 1..20: mol_type = other RNA
tcaaggaagatggcatttct

SEQ ID NO: 4537 - RNA, 20 nt, synthetic construct
  modified_base 1: mod_base = OTHER; note = thymine
  modified_base 20: mod_base = OTHER; note = thymine
  misc_feature 1..20: note = Antisense oligonucleotide
  modified_base 1: mod_base = OTHER; note = misc_feature - bicyclic nucleic acid scaffold modification
  modified_base 7: mod_base = OTHER; note = misc_feature - bicyclic nucleic acid scaffold modification
  modified_base 15: mod_base = OTHER; note = misc_feature - bicyclic nucleic acid scaffold modification
  modified_base 20: mod_base = OTHER; note = misc_feature - bicyclic nucleic acid scaffold modification
  source 1..20: mol_type = other RNA
tcaaggaagatggcatttct

SEQ ID NO: 4538 - RNA, 20 nt, synthetic construct
  modified_base 1: mod_base = OTHER; note = thymine
  modified_base 20: mod_base = OTHER; note = thymine
  misc_feature 1..20: note = Antisense oligonucleotide
  modified_base 1..2: mod_base = OTHER; note = misc_feature - bicyclic nucleic acid scaffold modification
  modified_base 7: mod_base = OTHER; note = misc_feature - bicyclic nucleic acid scaffold modification
  modified_base 15: mod_base = OTHER; note = misc_feature - bicyclic nucleic acid scaffold modification
  modified_base 20: mod_base = OTHER; note = misc_feature - bicyclic nucleic acid scaffold modification
  source 1..20: mol_type = other RNA
tcaaggaagatggcatttct

SEQ ID NO: 4539 - RNA, 20 nt, synthetic construct
  modified_base 1: mod_base = OTHER; note = thymine
  modified_base 11: mod_base = OTHER; note = thymine
  modified_base 20: mod_base = OTHER; note = thymine
  misc_feature 1..20: note = Antisense oligonucleotide
  modified_base 1..2: mod_base = OTHER; note = misc_feature - bicyclic nucleic acid scaffold modification
  modified_base 7: mod_base = OTHER; note = misc_feature - bicyclic nucleic acid scaffold modification
  modified_base 11: mod_base = OTHER; note = misc_feature - bicyclic nucleic acid scaffold modification
  modified_base 15: mod_base = OTHER; note = misc_feature - bicyclic nucleic acid scaffold modification
  modified_base 20: mod_base = OTHER; note = misc_feature - bicyclic nucleic acid scaffold modification
  source 1..20: mol_type = other RNA
tcaaggaagatggcatttct

SEQ ID NO: 4540 - RNA, 20 nt, synthetic construct
  modified_base 1: mod_base = OTHER; note = thymine
  modified_base 20: mod_base = OTHER; note = thymine
  misc_feature 1..20: note = Antisense oligonucleotide
  modified_base 1..2: mod_base = OTHER; note = misc_feature - bicyclic nucleic acid scaffold modification
  modified_base 6: mod_base = OTHER; note = misc_feature - bicyclic nucleic acid scaffold modification
  modified_base 10: mod_base = OTHER; note = misc_feature - bicyclic nucleic acid scaffold modification
  modified_base 15: mod_base = OTHER; note = misc_feature - bicyclic nucleic acid scaffold modification
  modified_base 20: mod_base = OTHER; note = misc_feature - bicyclic nucleic acid scaffold modification
  source 1..20: mol_type = other RNA
tcaaggaagatggcatttct

SEQ ID NO: 4541 - RNA, 20 nt, synthetic construct
  modified_base 1: mod_base = OTHER; note = thymine
  modified_base 20: mod_base = OTHER; note = thymine
  misc_feature 1..20: note = Antisense oligonucleotide
  modified_base 1: mod_base = OTHER; note = misc_feature - bicyclic nucleic acid scaffold modification
  modified_base 9: mod_base = OTHER; note = misc_feature - bicyclic nucleic acid scaffold modification
  modified_base 20: mod_base = OTHER; note = misc_feature - bicyclic nucleic acid scaffold modification
  source 1..20: mol_type = other RNA
tcaaggaagatggcatttct

SEQ ID NO: 4542 - RNA, 20 nt, synthetic construct
  misc_feature 1..20: note = Antisense oligonucleotide
  source 1..20: mol_type = other RNA
  modified_base 1: mod_base = OTHER; note = misc_feature - locked thymine bicyclic nucleic acid scaffold modification phosphorothioate
  modified_base 2: mod_base = OTHER; note = 5-methylcytosine phosphorothioate
  modified_base 3: mod_base = OTHER; note = 2'-O-methyl adenosine phosphorothioate
  modified_base 4: mod_base = OTHER; note = 2'-O-methyl adenosine phosphorothioate
  modified_base 5: mod_base = OTHER; note = 2'-O-methyl guanosine phosphorothioate
  modified_base 6: mod_base = OTHER; note = 2'-O-methyl guanosine phosphorothioate
  modified_base 7: mod_base = OTHER; note = 2'-O-methyl adenosine phosphorothioate
  modified_base 8: mod_base = OTHER; note = 2'-O-methyl adenosine phosphorothioate
  modified_base 9: mod_base = OTHER; note = 2'-O-methyl guanosine phosphorothioate
  modified_base 10: mod_base = OTHER; note = 2'-O-methyl adenosine phosphorothioate
  modified_base 11: mod_base = OTHER; note = 2'-O-methyl uridine phosphorothioate
  modified_base 12: mod_base = OTHER; note = 2'-O-methyl guanosine phosphorothioate
  modified_base 13: mod_base = OTHER; note = misc_feature - locked bicyclic nucleic acid scaffold modification phosphorothioate
  modified_base 14: mod_base = OTHER; note = 5-methylcytosine phosphorothioate
  modified_base 15: mod_base = OTHER; note = 2'-O-methyl adenosine phosphorothioate
  modified_base 16: mod_base = OTHER; note = 2'-O-methyl uridine phosphorothioate
  modified_base 17: mod_base = OTHER; note = 2'-O-methyl uridine phosphorothioate
  modified_base 18: mod_base = OTHER; note = 2'-O-methyl uridine phosphorothioate
  modified_base 19: mod_base = OTHER; note = 5-methylcytosine phosphorothioate
  modified_base 20: mod_base = OTHER; note = misc_feature - locked thymine bicyclic nucleic acid scaffold modification
tcaaggaagatggcatttct

SEQ ID NO: 4543 - RNA, 20 nt, synthetic construct
  modified_base 1: mod_base = OTHER; note = thymine
  modified_base 20: mod_base = OTHER; note = thymine
  misc_feature 1..20: note = Antisense oligonucleotide
  modified_base 1: mod_base = OTHER; note = misc_feature - bicyclic nucleic acid scaffold modification
  modified_base 9: mod_base = OTHER; note = misc_feature - bicyclic nucleic acid scaffold modification
  modified_base 13: mod_base = OTHER; note = misc_feature - bicyclic nucleic acid scaffold modification
  modified_base 20: mod_base = OTHER; note = misc_feature - bicyclic nucleic acid scaffold modification
  source 1..20: mol_type = other RNA
tcaaggaagatggcatttct

SEQ ID NO: 4544 - RNA, 20 nt, synthetic construct
  modified_base 1: mod_base = OTHER; note = thymine
  modified_base 20: mod_base = OTHER; note = thymine
  misc_feature 1..20: note = Antisense oligonucleotide
  modified_base 1: mod_base = OTHER; note = misc_feature - bicyclic nucleic acid scaffold modification
  modified_base 6: mod_base = OTHER; note = misc_feature - bicyclic nucleic acid scaffold modification
  modified_base 9: mod_base = OTHER; note = misc_feature - bicyclic nucleic acid scaffold modification
  modified_base 13: mod_base = OTHER; note = misc_feature - bicyclic nucleic acid scaffold modification
  modified_base 20: mod_base = OTHER; note = misc_feature - bicyclic nucleic acid scaffold modification
  source 1..20: mol_type = other RNA
tcaaggaagatggcatttct

SEQ ID NO: 4545 - RNA, 19 nt, synthetic construct
  modified_base 19: mod_base = OTHER; note = thymine
  misc_feature 1..19: note = Antisense oligonucleotide
  modified_base 1..2: mod_base = OTHER; note = misc_feature - bicyclic nucleic acid scaffold modification
  modified_base 19: mod_base = OTHER; note = misc_feature - bicyclic nucleic acid scaffold modification
  source 1..19: mol_type = other RNA
caaggaagatggcatttct

SEQ ID NO: 4546 - RNA, 19 nt, synthetic construct
  modified_base 19: mod_base = OTHER; note = thymine
  misc_feature 1..19: note = Antisense oligonucleotide
  modified_base 1..2: mod_base = OTHER; note = misc_feature - bicyclic nucleic acid scaffold modification
  modified_base 6: mod_base = OTHER; note = misc_feature - bicyclic nucleic acid scaffold modification
  modified_base 14: mod_base = OTHER; note = misc_feature - bicyclic nucleic acid scaffold modification
  modified_base 19: mod_base = OTHER; note = misc_feature - bicyclic nucleic acid scaffold modification
  source 1..19: mol_type = other RNA
caaggaagatggcatttct

SEQ ID NO: 4547 - RNA, 19 nt, synthetic construct
  modified_base 19: mod_base = OTHER; note = thymine
  misc_feature 1..19: note = Antisense oligonucleotide
  modified_base 1..2: mod_base = OTHER; note = misc_feature - bicyclic nucleic acid scaffold modification
  modified_base 6: mod_base = OTHER; note = misc_feature - bicyclic nucleic acid scaffold modification
  modified_base 9: mod_base = OTHER; note = misc_feature - bicyclic nucleic acid scaffold modification
  modified_base 14: mod_base = OTHER; note = misc_feature - bicyclic nucleic acid scaffold modification
  modified_base 19: mod_base = OTHER; note = misc_feature - bicyclic nucleic acid scaffold modification
  source 1..19: mol_type = other RNA
caaggaagatggcatttct

SEQ ID NO: 4548 - RNA, 19 nt, synthetic construct
  misc_feature 1..19: note = Antisense oligonucleotide
  source 1..19: mol_type = other RNA
  modified_base 1: mod_base = OTHER; note = misc_feature - locked 5-methylcytosine bicyclic nucleic acid scaffold modification phosphorothioate
  modified_base 2: mod_base = OTHER; note = misc_feature - locked bicyclic nucleic acid scaffold modification phosphorothioate
  modified_base 3: mod_base = OTHER; note = 2'-O-methyl adenosine phosphorothioate
  modified_base 4: mod_base = OTHER; note = 2'-O-methyl guanosine phosphorothioate
  modified_base 5: mod_base = OTHER; note = 2'-O-methyl guanosine phosphorothioate
  modified_base 6: mod_base = OTHER; note = 2'-O-methyl adenosine phosphorothioate
  modified_base 7: mod_base = OTHER; note = 2'-O-methyl adenosine phosphorothioate
  modified_base 8: mod_base = OTHER; note = misc_feature - locked bicyclic nucleic acid scaffold modification phosphorothioate
  modified_base 9: mod_base = OTHER; note = 2'-O-methyl adenosine phosphorothioate
  modified_base 10: mod_base = OTHER; note = 2'-O-methyl uridine phosphorothioate
  modified_base 11: mod_base = OTHER; note = 2'-O-methyl guanosine phosphorothioate
  modified_base 12: mod_base = OTHER; note = misc_feature - locked bicyclic nucleic acid scaffold modification phosphorothioate
  modified_base 13: mod_base = OTHER; note = 5-methylcytosine phosphorothioate
  modified_base 14: mod_base = OTHER; note = 2'-O-methyl adenosine phosphorothioate
  modified_base 15: mod_base = OTHER; note = 2'-O-methyl uridine phosphorothioate
  modified_base 16: mod_base = OTHER; note = 2'-O-methyl uridine phosphorothioate
  modified_base 17: mod_base = OTHER; note = 2'-O-methyl uridine phosphorothioate
  modified_base 18: mod_base = OTHER; note = 5-methylcytosine phosphorothioate
  modified_base 19: mod_base = OTHER; note = misc_feature - locked thymine bicyclic nucleic acid scaffold modification
caaggaagatggcatttct

SEQ ID NO: 4549 - RNA, 19 nt, synthetic construct
  modified_base 19: mod_base = OTHER; note = thymine
  misc_feature 1..19: note = Antisense oligonucleotide
  modified_base 1..2: mod_base = OTHER; note = misc_feature - bicyclic nucleic acid scaffold modification
  modified_base 8: mod_base = OTHER; note = misc_feature - bicyclic nucleic acid scaffold modification
  modified_base 19: mod_base = OTHER; note = misc_feature - bicyclic nucleic acid scaffold modification
  source 1..19: mol_type = other RNA
caaggaagatggcatttct

SEQ ID NO: 4550 - RNA, 19 nt, synthetic construct
  modified_base 19: mod_base = OTHER; note = thymine
  misc_feature 1..19: note = Antisense oligonucleotide
  modified_base 1..2: mod_base = OTHER; note = misc_feature - bicyclic nucleic acid scaffold modification
  modified_base 12: mod_base = OTHER; note = misc_feature - bicyclic nucleic acid scaffold modification
  modified_base 19: mod_base = OTHER; note = misc_feature - bicyclic nucleic acid scaffold modification
  source 1..19: mol_type = other RNA
caaggaagatggcatttct

SEQ ID NO: 4551 - RNA, 19 nt, synthetic construct
  modified_base 19: mod_base = OTHER; note = thymine
  misc_feature 1..19: note = Antisense oligonucleotide
  modified_base 1..2: mod_base = OTHER; note = misc_feature - bicyclic nucleic acid scaffold modification
  modified_base 5: mod_base = OTHER; note = misc_feature - bicyclic nucleic acid scaffold modification
  modified_base 8: mod_base = OTHER; note = misc_feature - bicyclic nucleic acid scaffold modification
  modified_base 12: mod_base = OTHER; note = misc_feature - bicyclic nucleic acid scaffold modification
  modified_base 19: mod_base = OTHER; note = misc_feature - bicyclic nucleic acid scaffold modification
  source 1..19: mol_type = other RNA
caaggaagatggcatttct

SEQ ID NO: 4552 - RNA, 18 nt, synthetic construct
  misc_feature 1..18: note = Antisense oligonucleotide
  modified_base 1: mod_base = OTHER; note = misc_feature - bicyclic nucleic acid scaffold modification
  modified_base 18: mod_base = OTHER; note = misc_feature - bicyclic nucleic acid scaffold modification
  source 1..18: mol_type = other RNA
caaggaagatggcatttc

SEQ ID NO: 4553 - RNA, 18 nt, synthetic construct
  misc_feature 1..18: note = Antisense oligonucleotide
  modified_base 1..2: mod_base = OTHER; note = misc_feature - bicyclic nucleic acid scaffold modification
  modified_base 18: mod_base = OTHER; note = misc_feature - bicyclic nucleic acid scaffold modification
  source 1..18: mol_type = other RNA
caaggaagatggcatttc

SEQ ID NO: 4554 - RNA, 18 nt, synthetic construct
  misc_feature 1..18: note = Antisense oligonucleotide
  modified_base 1..2: mod_base = OTHER; note = misc_feature - bicyclic nucleic acid scaffold modification
  modified_base 6: mod_base = OTHER; note = misc_feature - bicyclic nucleic acid scaffold modification
  modified_base 14: mod_base = OTHER; note = misc_feature - bicyclic nucleic acid scaffold modification
  modified_base 18: mod_base = OTHER; note = misc_feature - bicyclic nucleic acid scaffold modification
  source 1..18: mol_type = other RNA
caaggaagatggcatttc

SEQ ID NO: 4555 - RNA, 18 nt, synthetic construct
  modified_base 10: mod_base = OTHER; note = thymine
  misc_feature 1..18: note = Antisense oligonucleotide
  modified_base 1: mod_base = OTHER; note = misc_feature - bicyclic nucleic acid scaffold modification
  modified_base 6: mod_base = OTHER; note = misc_feature - bicyclic nucleic acid scaffold modification
  modified_base 10: mod_base = OTHER; note = misc_feature - bicyclic nucleic acid scaffold modification
  modified_base 14: mod_base = OTHER; note = misc_feature - bicyclic nucleic acid scaffold modification
  modified_base 18: mod_base = OTHER; note = misc_feature - bicyclic nucleic acid scaffold modification
  source 1..18: mol_type = other RNA
caaggaagatggcatttc

SEQ ID NO: 4556 - RNA, 18 nt, synthetic construct
  misc_feature 1..18: note = Antisense oligonucleotide
  modified_base 1: mod_base = OTHER; note = misc_feature - bicyclic nucleic acid scaffold modification
  modified_base 11: mod_base = OTHER; note = misc_feature - bicyclic nucleic acid scaffold modification
  modified_base 18: mod_base = OTHER; note = misc_feature - bicyclic nucleic acid scaffold modification
  source 1..18: mol_type = other RNA
caaggaagatggcatttc

SEQ ID NO: 4557 - RNA, 18 nt, synthetic construct
  misc_feature 1..18: note = Antisense oligonucleotide
  modified_base 1: mod_base = OTHER; note = misc_feature - bicyclic nucleic acid scaffold modification
  modified_base 8: mod_base = OTHER; note = misc_feature - bicyclic nucleic acid scaffold modification
  modified_base 18: mod_base = OTHER; note = misc_feature - bicyclic nucleic acid scaffold modification
  source 1..18: mol_type = other RNA
caaggaagatggcatttc

SEQ ID NO: 4558 - RNA, 18 nt, synthetic construct
  misc_feature 1..18: note = Antisense oligonucleotide
  modified_base 1: mod_base = OTHER; note = misc_feature - bicyclic nucleic acid scaffold modification
  modified_base 8: mod_base = OTHER; note = misc_feature - bicyclic nucleic acid scaffold modification
  modified_base 12: mod_base = OTHER; note = misc_feature - bicyclic nucleic acid scaffold modification
  modified_base 18: mod_base = OTHER; note = misc_feature - bicyclic nucleic acid scaffold modification
  source 1..18: mol_type = other RNA
caaggaagatggcatttc

SEQ ID NO: 4559 - RNA, 18 nt, synthetic construct
  misc_feature 1..18: note = Antisense oligonucleotide
  modified_base 1: mod_base = OTHER; note = misc_feature - bicyclic nucleic acid scaffold modification
  modified_base 4: mod_base = OTHER; note = misc_feature - bicyclic nucleic acid scaffold modification
  modified_base 8: mod_base = OTHER; note = misc_feature - bicyclic nucleic acid scaffold modification
  modified_base 12: mod_base = OTHER; note = misc_feature - bicyclic nucleic acid scaffold modification
  modified_base 18: mod_base = OTHER; note = misc_feature - bicyclic nucleic acid scaffold modification
  source 1..18: mol_type = other RNA
caaggaagatggcatttc

SEQ ID NO: 4560 - RNA, 18 nt, synthetic construct
  misc_feature 1..18: note = Antisense oligonucleotide
  modified_base 1: mod_base = OTHER; note = misc_feature - bicyclic nucleic acid scaffold modification
  modified_base 4..5: mod_base = OTHER; note = misc_feature - bicyclic nucleic acid scaffold modification
  modified_base 8: mod_base = OTHER; note = misc_feature - bicyclic nucleic acid scaffold modification
  modified_base 11..12: mod_base = OTHER; note = misc_feature - bicyclic nucleic acid scaffold modification
  modified_base 18: mod_base = OTHER; note = misc_feature - bicyclic nucleic acid scaffold modification
  source 1..18: mol_type = other RNA
caaggaagatggcatttc

SEQ ID NO: 4561 - RNA, 20 nt, synthetic construct
  modified_base 2: mod_base = OTHER; note = thymine
  misc_feature 1..20: note = Antisense oligonucleotide
  modified_base 1..2: mod_base = OTHER; note = misc_feature - bicyclic nucleic acid scaffold modification
  modified_base 20: mod_base = OTHER; note = misc_feature - bicyclic nucleic acid scaffold modification
  source 1..20: mol_type = other RNA
ctctgtgattttataacttg

SEQ ID NO: 4562 - RNA, 17 nt, synthetic construct
  modified_base 1: mod_base = OTHER; note = thymine
  modified_base 17: mod_base = OTHER; note = thymine
  misc_feature 1..17: note = Antisense oligonucleotide
  modified_base 1..2: mod_base = OTHER; note = misc_feature - bicyclic nucleic acid scaffold modification
  modified_base 17: mod_base = OTHER; note = misc_feature - bicyclic nucleic acid scaffold modification
  source 1..17: mol_type = other RNA
tcacccaccatcaccct

SEQ ID NO: 4563 - RNA, 19 nt, synthetic construct
  modified_base 1: mod_base = OTHER; note = thymine
  misc_feature 1..19: note = Antisense oligonucleotide
  modified_base 1..2: mod_base = OTHER; note = misc_feature - bicyclic nucleic acid scaffold modification
  modified_base 19: mod_base = OTHER; note = misc_feature - bicyclic nucleic acid scaffold modification
  source 1..19: mol_type = other RNA
tgatatcctcaaggtcacc

SEQ ID NO: 4564 - RNA, 18 nt, synthetic construct
  modified_base 2: mod_base = OTHER; note = thymine
  misc_feature 1..18: note = Antisense oligonucleotide
  modified_base 1..2: mod_base = OTHER; note = misc_feature - bicyclic nucleic acid scaffold modification
  modified_base 8: mod_base = OTHER; note = misc_feature - bicyclic nucleic acid scaffold modification
  modified_base 18: mod_base = OTHER; note = misc_feature - bicyclic nucleic acid scaffold modification
  source 1..18: mol_type = other RNA
ctgcttgatgatcatctc

SEQ ID NO: 4565 - RNA, 18 nt, synthetic construct
  modified_base 10: mod_base = OTHER; note = thymine
  misc_feature 1..18: note = Antisense oligonucleotide
  modified_base 1..2: mod_base = OTHER; note = misc_feature - bicyclic nucleic acid scaffold modification
  modified_base 10: mod_base = OTHER; note = misc_feature - bicyclic nucleic acid scaffold modification
  modified_base 18: mod_base = OTHER; note = misc_feature - bicyclic nucleic acid scaffold modification
  source 1..18: mol_type = other RNA
ggtaagttctgtccaagc

SEQ ID NO: 4566 - RNA, 18 nt, synthetic construct
  misc_feature 1..18: note = Antisense oligonucleotide
  modified_base 1..2: mod_base = OTHER; note = misc_feature - bicyclic nucleic acid scaffold modification
  modified_base 18: mod_base = OTHER; note = misc_feature - bicyclic nucleic acid scaffold modification
  source 1..18: mol_type = other RNA
ggtaagttctgtccaagc

SEQ ID NO: 4567 - RNA, 18 nt, synthetic construct
  misc_feature 1..18: note = Antisense oligonucleotide
  modified_base 1..2: mod_base = OTHER; note = misc_feature - bicyclic nucleic acid scaffold modification
  modified_base 17..18: mod_base = OTHER; note = misc_feature - bicyclic nucleic acid scaffold modification
  source 1..18: mol_type = other RNA
ggtaagttctgtccaagc

SEQ ID NO: 4568 - RNA, 18 nt, synthetic construct
  misc_feature 1..18: note = Antisense oligonucleotide
  source 1..18: mol_type = other RNA
  modified_base 1..2: mod_base = OTHER; note = misc_feature - locked bicyclic nucleic acid scaffold modification phosphorothioate
  modified_base 3: mod_base = OTHER; note = 2'-O-methyl uridine phosphorothioate
  modified_base 4: mod_base = OTHER; note = 2'-O-methyl adenosine phosphorothioate
  modified_base 5: mod_base = OTHER; note = 2'-O-methyl adenosine phosphorothioate
  modified_base 6: mod_base = OTHER; note = misc_feature - locked bicyclic nucleic acid scaffold modification phosphorothioate
  modified_base 7: mod_base = OTHER; note = 2'-O-methyl uridine phosphorothioate
  modified_base 8: mod_base = OTHER; note = 2'-O-methyl uridine phosphorothioate
  modified_base 9: mod_base = OTHER; note = 5-methylcytosine phosphorothioate
  modified_base 10: mod_base = OTHER; note = 2'-O-methyl uridine phosphorothioate
  modified_base 11: mod_base = OTHER; note = 2'-O-methyl guanosine phosphorothioate
  modified_base 12: mod_base = OTHER; note = 2'-O-methyl uridine phosphorothioate
  modified_base 13: mod_base = OTHER; note = 5-methylcytosine phosphorothioate
  modified_base 14: mod_base = OTHER; note = 5-methylcytosine phosphorothioate
  modified_base 15: mod_base = OTHER; note = 2'-O-methyl adenosine phosphorothioate
  modified_base 16: mod_base = OTHER; note = 2'-O-methyl adenosine phosphorothioate
  modified_base 17: mod_base = OTHER; note = 2'-O-methyl guanosine phosphorothioate
  modified_base 18: mod_base = OTHER; note = misc_feature - locked 5-methylcytosine bicyclic nucleic acid scaffold modification
ggtaagttctgtccaagc

SEQ ID NO: 4569 - RNA, 18 nt, synthetic construct
  misc_feature 1..18: note = Antisense oligonucleotide
  modified_base 1..2: mod_base = OTHER; note = misc_feature - bicyclic nucleic acid scaffold modification
  modified_base 11: mod_base = OTHER; note = misc_feature - bicyclic nucleic acid scaffold modification
  modified_base 18: mod_base = OTHER; note = misc_feature - bicyclic nucleic acid scaffold modification
  source 1..18: mol_type = other RNA
ggtaagttctgtccaagc

SEQ ID NO: 4570 - RNA, 18 nt, synthetic construct
  misc_feature 1..18: note = Antisense oligonucleotide
  modified_base 1..2: mod_base = OTHER; note = misc_feature - bicyclic nucleic acid scaffold modification
  modified_base 6: mod_base = OTHER; note = misc_feature - bicyclic nucleic acid scaffold modification
  modified_base 11: mod_base = OTHER; note = misc_feature - bicyclic nucleic acid scaffold modification
  modified_base 18: mod_base = OTHER; note = misc_feature - bicyclic nucleic acid scaffold modification
  source 1..18: mol_type = other RNA
ggtaagttctgtccaagc

SEQ ID NO: 4571 - RNA, 18 nt, synthetic construct
  misc_feature 1..18: note = Antisense oligonucleotide
  modified_base 1..2: mod_base = OTHER; note = misc_feature - bicyclic nucleic acid scaffold modification
  modified_base 6: mod_base = OTHER; note = misc_feature - bicyclic nucleic acid scaffold modification
  modified_base 11: mod_base = OTHER; note = misc_feature - bicyclic nucleic acid scaffold modification
  modified_base 17..18: mod_base = OTHER; note = misc_feature - bicyclic nucleic acid scaffold modification
  source 1..18: mol_type = other RNA
ggtaagttctgtccaagc

SEQ ID NO: 4572 - RNA, 19 nt, synthetic construct
  modified_base 2: mod_base = OTHER; note = thymine
  misc_feature 1..19: note = Antisense oligonucleotide
  modified_base 1..2: mod_base = OTHER; note = misc_feature - bicyclic nucleic acid scaffold modification
  modified_base 9: mod_base = OTHER; note = misc_feature - bicyclic nucleic acid scaffold modification
  modified_base 19: mod_base = OTHER; note = misc_feature - bicyclic nucleic acid scaffold modification
  source 1..19: mol_type = other RNA
gtttccttagtaaccacag

SEQ ID NO: 4573 - RNA, 18 nt, synthetic construct
  misc_feature 1..18: note = Antisense oligonucleotide
  modified_base 1: mod_base = OTHER; note = misc_feature - bicyclic nucleic acid scaffold modification
  modified_base 3: mod_base = OTHER; note = misc_feature - bicyclic nucleic acid scaffold modification
  modified_base 18: mod_base = OTHER; note = misc_feature - bicyclic nucleic acid scaffold modification
  source 1..18: mol_type = other RNA
ctgttgcctccggttctg

SEQ ID NO: 4574 - RNA, 18 nt, synthetic construct
  misc_feature 1..18: note = Antisense oligonucleotide
  modified_base 1: mod_base = OTHER; note = misc_feature - bicyclic nucleic acid scaffold modification
  modified_base 6: mod_base = OTHER; note = misc_feature - bicyclic nucleic acid scaffold modification
  modified_base 18: mod_base = OTHER; note = misc_feature - bicyclic nucleic acid scaffold modification
  source 1..18: mol_type = other RNA
ctgttgcctccggttctg

SEQ ID NO: 4575 - RNA, 18 nt, synthetic construct
  misc_feature 1..18: note = Antisense oligonucleotide
  modified_base 1: mod_base = OTHER; note = misc_feature - bicyclic nucleic acid scaffold modification
  modified_base 12: mod_base = OTHER; note = misc_feature - bicyclic nucleic acid scaffold modification
  modified_base 18: mod_base = OTHER; note = misc_feature - bicyclic nucleic acid scaffold modification
  source 1..18: mol_type = other RNA
ctgttgcctccggttctg

SEQ ID NO: 4576 - RNA, 18 nt, synthetic construct
  misc_feature 1..18: note = Antisense oligonucleotide
  modified_base 1: mod_base = OTHER; note = misc_feature - bicyclic nucleic acid scaffold modification
  modified_base 13: mod_base = OTHER; note = misc_feature - bicyclic nucleic acid scaffold modification
  modified_base 18: mod_base = OTHER; note = misc_feature - bicyclic nucleic acid scaffold modification
  source 1..18: mol_type = other RNA
ctgttgcctccggttctg

SEQ ID NO: 4577 - RNA, 18 nt, synthetic construct
  misc_feature 1..18: note = Antisense oligonucleotide
  modified_base 1: mod_base = OTHER; note = misc_feature - bicyclic nucleic acid scaffold modification
  modified_base 3: mod_base = OTHER; note = misc_feature - bicyclic nucleic acid scaffold modification
  modified_base 13: mod_base = OTHER; note = misc_feature - bicyclic nucleic acid scaffold modification
  modified_base 18: mod_base = OTHER; note = misc_feature - bicyclic nucleic acid scaffold modification
  source 1..18: mol_type = other RNA
ctgttgcctccggttctg

SEQ ID NO: 4578 - RNA, 18 nt, synthetic construct
  misc_feature 1..18: note = Antisense oligonucleotide
  modified_base 1: mod_base = OTHER; note = misc_feature - bicyclic nucleic acid scaffold modification
  modified_base 6: mod_base = OTHER; note = misc_feature - bicyclic nucleic acid scaffold modification
  modified_base 12: mod_base = OTHER; note = misc_feature - bicyclic nucleic acid scaffold modification
  modified_base 18: mod_base = OTHER; note = misc_feature - bicyclic nucleic acid scaffold modification
  source 1..18: mol_type = other RNA
ctgttgcctccggttctg

SEQ ID NO: 4579 - RNA, 18 nt, synthetic construct
  misc_feature 1..18: note = Antisense oligonucleotide
  modified_base 1: mod_base = OTHER; note = misc_feature - bicyclic nucleic acid scaffold modification
  modified_base 3: mod_base = OTHER; note = misc_feature - bicyclic nucleic acid scaffold modification
  modified_base 6: mod_base = OTHER; note = misc_feature - bicyclic nucleic acid scaffold modification
  modified_base 18: mod_base = OTHER; note = misc_feature - bicyclic nucleic acid scaffold modification
  source 1..18: mol_type = other RNA
ctgttgcctccggttctg

SEQ ID NO: 4580 - RNA, 18 nt, synthetic construct
  misc_feature 1..18: note = Antisense oligonucleotide
  modified_base 1: mod_base = OTHER; note = misc_feature - bicyclic nucleic acid scaffold modification
  modified_base 3: mod_base = OTHER; note = misc_feature - bicyclic nucleic acid scaffold modification
  modified_base 6: mod_base = OTHER; note = misc_feature - bicyclic nucleic acid scaffold modification
  modified_base 13: mod_base = OTHER; note = misc_feature - bicyclic nucleic acid scaffold modification
  modified_base 18: mod_base = OTHER; note = misc_feature - bicyclic nucleic acid scaffold modification
  source 1..18: mol_type = other RNA
ctgttgcctccggttctg

SEQ ID NO: 4581 - RNA, 18 nt, synthetic construct
  misc_feature 1..18: note = Antisense oligonucleotide
  modified_base 1: mod_base = OTHER; note = misc_feature - bicyclic nucleic acid scaffold modification
  modified_base 7: mod_base = OTHER; note = misc_feature - bicyclic nucleic acid scaffold modification
  modified_base 18: mod_base = OTHER; note = misc_feature - bicyclic nucleic acid scaffold modification
  source 1..18: mol_type = other RNA
ctgttgcctccggttctg

SEQ ID NO: 4582 - RNA, 18 nt, synthetic construct
  misc_feature 1..18: note = Antisense oligonucleotide
  modified_base 1: mod_base = OTHER; note = misc_feature - bicyclic nucleic acid scaffold modification
  modified_base 8: mod_base = OTHER; note = misc_feature - bicyclic nucleic acid scaffold modification
  modified_base 18: mod_base = OTHER; note = misc_feature - bicyclic nucleic acid scaffold modification
  source 1..18: mol_type = other RNA
ctgttgcctccggttctg

SEQ ID NO: 4583 - RNA, 18 nt, synthetic construct
  misc_feature 1..18: note = Antisense oligonucleotide
  modified_base 1: mod_base = OTHER; note = misc_feature - bicyclic nucleic acid scaffold modification
  modified_base 10: mod_base = OTHER; note = misc_feature - bicyclic nucleic acid scaffold modification
  modified_base 18: mod_base = OTHER; note = misc_feature - bicyclic nucleic acid scaffold modification
  source 1..18: mol_type = other RNA
ctgttgcctccggttctg

SEQ ID NO: 4584 - RNA, 18 nt, synthetic construct
  misc_feature 1..18: note = Antisense oligonucleotide
  modified_base 1: mod_base = OTHER; note = misc_feature - bicyclic nucleic acid scaffold modification
  modified_base 11: mod_base = OTHER; note = misc_feature - bicyclic nucleic acid scaffold modification
  modified_base 18: mod_base = OTHER; note = misc_feature - bicyclic nucleic acid scaffold modification
  source 1..18: mol_type = other RNA
ctgttgcctccggttctg

SEQ ID NO: 4585 - RNA, 18 nt, synthetic construct
  misc_feature 1..18: note = Antisense oligonucleotide
  modified_base 1: mod_base = OTHER; note = misc_feature - bicyclic nucleic acid scaffold modification
  modified_base 16: mod_base = OTHER; note = misc_feature - bicyclic nucleic acid scaffold modification
  modified_base 18: mod_base = OTHER; note = misc_feature - bicyclic nucleic acid scaffold modification
  source 1..18: mol_type = other RNA
ctgttgcctccggttctg

SEQ ID NO: 4586 - RNA, 18 nt, synthetic construct
  misc_feature 1..18: note = Antisense oligonucleotide
  modified_base 1: mod_base = OTHER; note = misc_feature - bicyclic nucleic acid scaffold modification
  modified_base 8: mod_base = OTHER; note = misc_feature - bicyclic nucleic acid scaffold modification
  modified_base 16: mod_base = OTHER; note = misc_feature - bicyclic nucleic acid scaffold modification
  modified_base 18: mod_base = OTHER; note = misc_feature - bicyclic nucleic acid scaffold modification
  source 1..18: mol_type = other RNA
ctgttgcctccggttctg

SEQ ID NO: 4587 - RNA, 18 nt, synthetic construct
  misc_feature 1..18: note = Antisense oligonucleotide
  modified_base 1: mod_base = OTHER; note = misc_feature - bicyclic nucleic acid scaffold modification
  modified_base 7: mod_base = OTHER; note = misc_feature - bicyclic nucleic acid scaffold modification
  modified_base 10: mod_base = OTHER; note = misc_feature - bicyclic nucleic acid scaffold modification
  modified_base 18: mod_base = OTHER; note = misc_feature - bicyclic nucleic acid scaffold modification
  source 1..18: mol_type = other RNA
ctgttgcctccggttctg

SEQ ID NO: 4588 - RNA, 18 nt, synthetic construct
  modified_base 2: mod_base = OTHER; note = thymine
  modified_base 17: mod_base = OTHER; note = thymine
  misc_feature 1..18: note = Antisense oligonucleotide
  modified_base 1..2: mod_base = OTHER; note = misc_feature - bicyclic nucleic acid scaffold modification
  modified_base 17..18: mod_base = OTHER; note = misc_feature - bicyclic nucleic acid scaffold modification
  source 1..18: mol_type = other RNA
ctgttgcctccggttctg

SEQ ID NO: 4589 - RNA, 18 nt, synthetic construct
  modified_base 2: mod_base = OTHER; note = thymine
  modified_base 17: mod_base = OTHER; note = thymine
  misc_feature 1..18: note = Antisense oligonucleotide
  modified_base 1..2: mod_base = OTHER; note = misc_feature - bicyclic nucleic acid scaffold modification
  modified_base 6: mod_base = OTHER; note = misc_feature - bicyclic nucleic acid scaffold modification
  modified_base 13: mod_base = OTHER; note = misc_feature - bicyclic nucleic acid scaffold modification
  modified_base 17..18: mod_base = OTHER; note = misc_feature - bicyclic nucleic acid scaffold modification
  source 1..18: mol_type = other RNA
ctgttgcctccggttctg

SEQ ID NO: 4590 - RNA, 18 nt, synthetic construct
  modified_base 2: mod_base = OTHER; note = thymine
  modified_base 17: mod_base = OTHER; note = thymine
  misc_feature 1..18: note = Antisense oligonucleotide
  modified_base 1..2: mod_base = OTHER; note = misc_feature - bicyclic nucleic acid scaffold modification
  modified_base 8: mod_base = OTHER; note = misc_feature - bicyclic nucleic acid scaffold modification
  modified_base 13: mod_base = OTHER; note = misc_feature - bicyclic nucleic acid scaffold modification
  modified_base 17..18: mod_base = OTHER; note = misc_feature - bicyclic nucleic acid scaffold modification
  source 1..18: mol_type = other RNA
ctgttgcctccggttctg

SEQ ID NO: 4591 - RNA, 16 nt, synthetic construct
  misc_feature 1..16: note = Antisense oligonucleotide
  modified_base 1: mod_base = OTHER; note = misc_feature - bicyclic nucleic acid scaffold modification
  modified_base 16: mod_base = OTHER; note = misc_feature - bicyclic nucleic acid scaffold modification
  source 1..16: mol_type = other RNA
ctgttgcctccggttc

SEQ ID NO: 4592 - RNA, 16 nt, synthetic construct
  misc_feature 1..16: note = Antisense oligonucleotide
  modified_base 1: mod_base = OTHER; note = misc_feature - bicyclic nucleic acid scaffold modification
  modified_base 3: mod_base = OTHER; note = misc_feature - bicyclic nucleic acid scaffold modification
  modified_base 16: mod_base = OTHER; note = misc_feature - bicyclic nucleic acid scaffold modification
  source 1..16: mol_type = other RNA
ctgttgcctccggttc

SEQ ID NO: 4593 - RNA, 16 nt, synthetic construct
  misc_feature 1..16: note = Antisense oligonucleotide
  modified_base 1: mod_base = OTHER; note = misc_feature - bicyclic nucleic acid scaffold modification
  modified_base 6: mod_base = OTHER; note = misc_feature - bicyclic nucleic acid scaffold modification
  modified_base 16: mod_base = OTHER; note = misc_feature - bicyclic nucleic acid scaffold modification
  source 1..16: mol_type = other RNA
ctgttgcctccggttc

SEQ ID NO: 4594 - RNA, 16 nt, synthetic construct
  misc_feature 1..16: note = Antisense oligonucleotide
  modified_base 1: mod_base = OTHER; note = misc_feature - bicyclic nucleic acid scaffold modification
  modified_base 13: mod_base = OTHER; note = misc_feature - bicyclic nucleic acid scaffold modification
  modified_base 16: mod_base = OTHER; note = misc_feature - bicyclic nucleic acid scaffold modification
  source 1..16: mol_type = other RNA
ctgttgcctccggttc

SEQ ID NO: 4595 - RNA, 16 nt, synthetic construct
  misc_feature 1..16: note = Antisense oligonucleotide
  modified_base 1: mod_base = OTHER; note = misc_feature - bicyclic nucleic acid scaffold modification
  modified_base 3: mod_base = OTHER; note = misc_feature - bicyclic nucleic acid scaffold modification
  modified_base 13: mod_base = OTHER; note = misc_feature - bicyclic nucleic acid scaffold modification
  modified_base 16: mod_base = OTHER; note = misc_feature - bicyclic nucleic acid scaffold modification
  source 1..16: mol_type = other RNA
ctgttgcctccggttc

SEQ ID NO: 4596 - RNA, 16 nt, synthetic construct
  misc_feature 1..16: note = Antisense oligonucleotide
  modified_base 1: mod_base = OTHER; note = misc_feature - bicyclic nucleic acid scaffold modification
  modified_base 6: mod_base = OTHER; note = misc_feature - bicyclic nucleic acid scaffold modification
  modified_base 12: mod_base = OTHER; note = misc_feature - bicyclic nucleic acid scaffold modification
  modified_base 16: mod_base = OTHER; note = misc_feature - bicyclic nucleic acid scaffold modification
  source 1..16: mol_type = other RNA
ctgttgcctccggttc

SEQ ID NO: 4597 - RNA, 16 nt, synthetic construct
  misc_feature 1..16: note = Antisense oligonucleotide
  modified_base 1: mod_base = OTHER; note = misc_feature - bicyclic nucleic acid scaffold modification
  modified_base 8: mod_base = OTHER; note = misc_feature - bicyclic nucleic acid scaffold modification
  modified_base 16: mod_base = OTHER; note = misc_feature - bicyclic nucleic acid scaffold modification
  source 1..16: mol_type = other RNA
ctgttgcctccggttc

SEQ ID NO: 4598 - RNA, 16 nt, synthetic construct
  misc_feature 1..16: note = Antisense oligonucleotide
  modified_base 1: mod_base = OTHER; note = misc_feature - bicyclic nucleic acid scaffold modification
  modified_base 10: mod_base = OTHER; note = misc_feature - bicyclic nucleic acid scaffold modification
  modified_base 16: mod_base = OTHER; note = misc_feature - bicyclic nucleic acid scaffold modification
  source 1..16: mol_type = other RNA
ctgttgcctccggttc

SEQ ID NO: 4599 - RNA, 16 nt, synthetic construct
  misc_feature 1..16: note = Antisense oligonucleotide
  modified_base 1: mod_base = OTHER; note = misc_feature - bicyclic nucleic acid scaffold modification
  modified_base 8: mod_base = OTHER; note = misc_feature - bicyclic nucleic acid scaffold modification
  modified_base 10: mod_base = OTHER; note = misc_feature - bicyclic nucleic acid scaffold modification
  modified_base 16: mod_base = OTHER; note = misc_feature - bicyclic nucleic acid scaffold modification
  source 1..16: mol_type = other RNA
ctgttgcctccggttc

SEQ ID NO: 4600 - RNA, 16 nt, synthetic construct
  modified_base 2: mod_base = OTHER; note = thymine
  modified_base 15: mod_base = OTHER; note = thymine
  misc_feature 1..16: note = Antisense oligonucleotide
  modified_base 1..2: mod_base = OTHER; note = misc_feature - bicyclic nucleic acid scaffold modification
  modified_base 15..16: mod_base = OTHER; note = misc_feature - bicyclic nucleic acid scaffold modification
  source 1..16: mol_type = other RNA
ctgttgcctccggttc

SEQ ID NO: 4601 - RNA, 16 nt, synthetic construct
  modified_base 2: mod_base = OTHER; note = thymine
  modified_base 15: mod_base = OTHER; note = thymine
  misc_feature 1..16: note = Antisense oligonucleotide
  modified_base 1..2: mod_base = OTHER; note = misc_feature - bicyclic nucleic acid scaffold modification
  modified_base 6: mod_base = OTHER; note = misc_feature - bicyclic nucleic acid scaffold modification
  modified_base 15..16: mod_base = OTHER; note = misc_feature - bicyclic nucleic acid scaffold modification
  source 1..16: mol_type = other RNA
ctgttgcctccggttc

SEQ ID NO: 4602 - RNA, 16 nt, synthetic construct
  modified_base 2: mod_base = OTHER; note = thymine
  modified_base 15: mod_base = OTHER; note = thymine
  misc_feature 1..16: note = Antisense oligonucleotide
  modified_base 1..2: mod_base = OTHER; note = misc_feature - bicyclic nucleic acid scaffold modification
  modified_base 6: mod_base = OTHER; note = misc_feature - bicyclic nucleic acid scaffold modification
  modified_base 13: mod_base = OTHER; note = misc_feature - bicyclic nucleic acid scaffold modification
  modified_base 15..16: mod_base = OTHER; note = misc_feature - bicyclic nucleic acid scaffold modification
  source 1..16: mol_type = other RNA
ctgttgcctccggttc

SEQ ID NO: 4603 - RNA, 16 nt, synthetic construct
  misc_feature 1..16: note = Antisense oligonucleotide
  modified_base 1: mod_base = OTHER; note = misc_feature - bicyclic nucleic acid scaffold modification
  modified_base 16: mod_base = OTHER; note = misc_feature - bicyclic nucleic acid scaffold modification
  source 1..16: mol_type = other RNA
gttgcctccggttctg

SEQ ID NO: 4604 - RNA, 16 nt, synthetic construct
  misc_feature 1..16: note = Antisense oligonucleotide
  modified_base 1: mod_base = OTHER; note = misc_feature - bicyclic nucleic acid scaffold modification
  modified_base 4: mod_base = OTHER; note = misc_feature - bicyclic nucleic acid scaffold modification
  modified_base 16: mod_base = OTHER; note = misc_feature - bicyclic nucleic acid scaffold modification
  source 1..16: mol_type = other RNA
gttgcctccggttctg

SEQ ID NO: 4605 - RNA, 16 nt, synthetic construct
  misc_feature 1..16: note = Antisense oligonucleotide
  modified_base 1: mod_base = OTHER; note = misc_feature - bicyclic nucleic acid scaffold modification
  modified_base 11: mod_base = OTHER; note = misc_feature - bicyclic nucleic acid scaffold modification
  modified_base 16: mod_base = OTHER; note = misc_feature - bicyclic nucleic acid scaffold modification
  source 1..16: mol_type = other RNA
gttgcctccggttctg

SEQ ID NO: 4606 - RNA, 16 nt, synthetic construct
  misc_feature 1..16: note = Antisense oligonucleotide
  modified_base 1: mod_base = OTHER; note = misc_feature - bicyclic nucleic acid scaffold modification
  modified_base 4: mod_base = OTHER; note = misc_feature - bicyclic nucleic acid scaffold modification
  modified_base 11: mod_base = OTHER; note = misc_feature - bicyclic nucleic acid scaffold modification
  modified_base 16: mod_base = OTHER; note = misc_feature - bicyclic nucleic acid scaffold modification
  source 1..16: mol_type = other RNA
gttgcctccggttctg

SEQ ID NO: 4607 - RNA, 16 nt, synthetic construct
  misc_feature 1..16: note = Antisense oligonucleotide
  modified_base 1: mod_base = OTHER; note = misc_feature - bicyclic nucleic acid scaffold modification
  modified_base 14: mod_base = OTHER; note = misc_feature - bicyclic nucleic acid scaffold modification
  modified_base 16: mod_base = OTHER; note = misc_feature - bicyclic nucleic acid scaffold modification
  source 1..16: mol_type = other RNA
gttgcctccggttctg

SEQ ID NO: 4608 - RNA, 16 nt, synthetic construct
  misc_feature 1..16: note = Antisense oligonucleotide
  modified_base 1: mod_base = OTHER; note = misc_feature - bicyclic nucleic acid scaffold modification
  modified_base 8: mod_base = OTHER; note = misc_feature - bicyclic nucleic acid scaffold modification
  modified_base 16: mod_base = OTHER; note = misc_feature - bicyclic nucleic acid scaffold modification
  source 1..16: mol_type = other RNA
gttgcctccggttctg

SEQ ID NO: 4609 - RNA, 16 nt, synthetic construct
  misc_feature 1..16: note = Antisense oligonucleotide
  modified_base 1: mod_base = OTHER; note = misc_feature - bicyclic nucleic acid scaffold modification
  modified_base 16: mod_base = OTHER; note = misc_feature - bicyclic nucleic acid scaffold modification
  source 1..16: mol_type = other RNA
gttgcctccggttctg

SEQ ID NO: 4610 - RNA, 16 nt, synthetic construct
  misc_feature 1..16: note = Antisense oligonucleotide
  modified_base 1: mod_base = OTHER; note = misc_feature - bicyclic nucleic acid scaffold modification
  modified_base 6: mod_base = OTHER; note = misc_feature - bicyclic nucleic acid scaffold modification
  modified_base 16: mod_base = OTHER; note = misc_feature - bicyclic nucleic acid scaffold modification
  source 1..16: mol_type = other RNA
gttgcctccggttctg

SEQ ID NO: 4611 - RNA, 16 nt, synthetic construct
  misc_feature 1..16: note = Antisense oligonucleotide
  modified_base 1: mod_base = OTHER; note = misc_feature - bicyclic nucleic acid scaffold modification
  modified_base 6: mod_base = OTHER; note = misc_feature - bicyclic nucleic acid scaffold modification
  modified_base 14: mod_base = OTHER; note = misc_feature - bicyclic nucleic acid scaffold modification
  modified_base 16: mod_base = OTHER; note = misc_feature - bicyclic nucleic acid scaffold modification
  source 1..16: mol_type = other RNA
gttgcctccggttctg

SEQ ID NO: 4612 - RNA, 16 nt, synthetic construct
  misc_feature 1..16: note = Antisense oligonucleotide
  modified_base 1: mod_base = OTHER; note = misc_feature - bicyclic nucleic acid scaffold modification
  modified_base 8: mod_base = OTHER; note = misc_feature - bicyclic nucleic acid scaffold modification
  modified_base 14: mod_base = OTHER; note = misc_feature - bicyclic nucleic acid scaffold modification
  modified_base 16: mod_base = OTHER; note = misc_feature - bicyclic nucleic acid scaffold modification
  source 1..16: mol_type = other RNA
gttgcctccggttctg

SEQ ID NO: 4613 - RNA, 16 nt, synthetic construct
  misc_feature 1..16: note = Antisense oligonucleotide
  modified_base 1: mod_base = OTHER; note = misc_feature - bicyclic nucleic acid scaffold modification
  modified_base 6: mod_base = OTHER; note = misc_feature - bicyclic nucleic acid scaffold modification
  modified_base 8: mod_base = OTHER; note = misc_feature - bicyclic nucleic acid scaffold modification
  modified_base 16: mod_base = OTHER; note = misc_feature - bicyclic nucleic acid scaffold modification
  source 1..16: mol_type = other RNA
gttgcctccggttctg

SEQ ID NO: 4614 - RNA, 16 nt, synthetic construct
  modified_base 2: mod_base = OTHER; note = thymine
  modified_base 15: mod_base = OTHER; note = thymine
  misc_feature 1..16: note = Antisense oligonucleotide
  modified_base 1..2: mod_base = OTHER; note = misc_feature - bicyclic nucleic acid scaffold modification
  modified_base 15..16: mod_base = OTHER; note = misc_feature - bicyclic nucleic acid scaffold modification
  source 1..16: mol_type = other RNA
gttgcctccggttctg

SEQ ID NO: 4615 - RNA, 16 nt, synthetic construct
  modified_base 2: mod_base = OTHER; note = thymine
  modified_base 15: mod_base = OTHER; note = thymine
  misc_feature 1..16: note = Antisense oligonucleotide
  modified_base 1..2: mod_base = OTHER; note = misc_feature - bicyclic nucleic acid scaffold modification
  modified_base 4: mod_base = OTHER; note = misc_feature - bicyclic nucleic acid scaffold modification
  modified_base 11: mod_base = OTHER; note = misc_feature - bicyclic nucleic acid scaffold modification
  modified_base 15..16: mod_base = OTHER; note = misc_feature - bicyclic nucleic acid scaffold modification
  source 1..16: mol_type = other RNA
gttgcctccggttctg

SEQ ID NO: 4616 - RNA, 16 nt, synthetic construct
  modified_base 2: mod_base = OTHER; note = thymine
  modified_base 15: mod_base = OTHER; note = thymine
  misc_feature 1..16: note = Antisense oligonucleotide
  modified_base 1..2: mod_base = OTHER; note = misc_feature - bicyclic nucleic acid scaffold modification
  modified_base 6: mod_base = OTHER; note = misc_feature - bicyclic nucleic acid scaffold modification
  modified_base 8: mod_base = OTHER; note = misc_feature - bicyclic nucleic acid scaffold modification
  modified_base 15..16: mod_base = OTHER; note = misc_feature - bicyclic nucleic acid scaffold modification
  source 1..16: mol_type = other RNA
gttgcctccggttctg

SEQ ID NO: 4617 - RNA, 16 nt, synthetic construct
  modified_base 1: mod_base = OTHER; note = thymine
  modified_base 16: mod_base = OTHER; note = thymine
  misc_feature 1..16: note = Antisense oligonucleotide
  modified_base 1: mod_base = OTHER; note = misc_feature - bicyclic nucleic acid scaffold modification
  modified_base 16: mod_base = OTHER; note = misc_feature - bicyclic nucleic acid scaffold modification
  source 1..16: mol_type = other RNA
tgttgcctccggttct

SEQ ID NO: 4618 - RNA, 16 nt, synthetic construct
  modified_base 1: mod_base = OTHER; note = thymine
  modified_base 16: mod_base = OTHER; note = thymine
  misc_feature 1..16: note = Antisense oligonucleotide
  modified_base 1: mod_base = OTHER; note = misc_feature - bicyclic nucleic acid scaffold modification
  modified_base 5: mod_base = OTHER; note = misc_feature - bicyclic nucleic acid scaffold modification
  modified_base 16: mod_base = OTHER; note = misc_feature - bicyclic nucleic acid scaffold modification
  source 1..16: mol_type = other RNA
tgttgcctccggttct

SEQ ID NO: 4619 - RNA, 16 nt, synthetic construct
  modified_base 1: mod_base = OTHER; note = thymine
  modified_base 16: mod_base = OTHER; note = thymine
  misc_feature 1..16: note = Antisense oligonucleotide
  modified_base 1: mod_base = OTHER; note = misc_feature - bicyclic nucleic acid scaffold modification
  modified_base 12: mod_base = OTHER; note = misc_feature - bicyclic nucleic acid scaffold modification
  modified_base 16: mod_base = OTHER; note = misc_feature - bicyclic nucleic acid scaffold modification
  source 1..16: mol_type = other RNA
tgttgcctccggttct

SEQ ID NO: 4620 - RNA, 16 nt, synthetic construct
  modified_base 1: mod_base = OTHER; note = thymine
  modified_base 16: mod_base = OTHER; note = thymine
  misc_feature 1..16: note = Antisense oligonucleotide
  modified_base 1: mod_base = OTHER; note = misc_feature - bicyclic nucleic acid scaffold modification
  modified_base 5: mod_base = OTHER; note = misc_feature - bicyclic nucleic acid scaffold modification
  modified_base 12: mod_base = OTHER; note = misc_feature - bicyclic nucleic acid scaffold modification
  modified_base 16: mod_base = OTHER; note = misc_feature - bicyclic nucleic acid scaffold modification
  source 1..16: mol_type = other RNA
tgttgcctccggttct

SEQ ID NO: 4621 - RNA, 16 nt, synthetic construct
  modified_base 1: mod_base = OTHER; note = thymine
  modified_base 16: mod_base = OTHER; note = thymine
  misc_feature 1..16: note = Antisense oligonucleotide
  modified_base 1: mod_base = OTHER; note = misc_feature - bicyclic nucleic acid scaffold modification
  modified_base 7: mod_base = OTHER; note = misc_feature - bicyclic nucleic acid scaffold modification
  modified_base 16: mod_base = OTHER; note = misc_feature - bicyclic nucleic acid scaffold modification
  source 1..16: mol_type = other RNA
tgttgcctccggttct

SEQ ID NO: 4622 - RNA, 16 nt, synthetic construct
  modified_base 1: mod_base = OTHER; note = thymine
  modified_base 16: mod_base = OTHER; note = thymine
  misc_feature 1..16: note = Antisense oligonucleotide
  modified_base 1: mod_base = OTHER; note = misc_feature - bicyclic nucleic acid scaffold modification
  modified_base 9: mod_base = OTHER; note = misc_feature - bicyclic nucleic acid scaffold modification
  modified_base 16: mod_base = OTHER; note = misc_feature - bicyclic nucleic acid scaffold modification
  source 1..16: mol_type = other RNA
tgttgcctccggttct

SEQ ID NO: 4623 - RNA, 16 nt, synthetic construct
  modified_base 1: mod_base = OTHER; note = thymine
  modified_base 16: mod_base = OTHER; note = thymine
  misc_feature 1..16: note = Antisense oligonucleotide
  modified_base 1: mod_base = OTHER; note = misc_feature - bicyclic nucleic acid scaffold modification
  modified_base 7: mod_base = OTHER; note = misc_feature - bicyclic nucleic acid scaffold modification
  modified_base 9: mod_base = OTHER; note = misc_feature - bicyclic nucleic acid scaffold modification
  modified_base 16: mod_base = OTHER; note = misc_feature - bicyclic nucleic acid scaffold modification
  source 1..16: mol_type = other RNA
tgttgcctccggttct

SEQ ID NO: 4624 - RNA, 16 nt, synthetic construct
  modified_base 1: mod_base = OTHER; note = thymine
  modified_base 16: mod_base = OTHER; note = thymine
  misc_feature 1..16: note = Antisense oligonucleotide
  modified_base 1..2: mod_base = OTHER; note = misc_feature - bicyclic nucleic acid scaffold modification
  modified_base 15..16: mod_base = OTHER; note = misc_feature - bicyclic nucleic acid scaffold modification
  source 1..16: mol_type = other RNA
tgttgcctccggttct

SEQ ID NO: 4625 - RNA, 16 nt, synthetic construct
  modified_base 1: mod_base = OTHER; note = thymine
  modified_base 16: mod_base = OTHER; note = thymine
  misc_feature 1..16: note = Antisense oligonucleotide
  modified_base 1..2: mod_base = OTHER; note = misc_feature - bicyclic nucleic acid scaffold modification
  modified_base 5: mod_base = OTHER; note = misc_feature - bicyclic nucleic acid scaffold modification
  modified_base 15..16: mod_base = OTHER; note = misc_feature - bicyclic nucleic acid scaffold modification
  source 1..16: mol_type = other RNA
tgttgcctccggttct

SEQ ID NO: 4626 - RNA, 16 nt, synthetic construct
  modified_base 1: mod_base = OTHER; note = thymine
  modified_base 16: mod_base = OTHER; note = thymine
  misc_feature 1..16: note = Antisense oligonucleotide
  modified_base 1..2: mod_base = OTHER; note = misc_feature - bicyclic nucleic acid scaffold modification
  modified_base 12: mod_base = OTHER; note = misc_feature - bicyclic nucleic acid scaffold modification
  modified_base 15..16: mod_base = OTHER; note = misc_feature - bicyclic nucleic acid scaffold modification
  source 1..16: mol_type = other RNA
tgttgcctccggttct

SEQ ID NO: 4627 - RNA, 16 nt, synthetic construct
  modified_base 1: mod_base = OTHER; note = thymine
  modified_base 16: mod_base = OTHER; note = thymine
  misc_feature 1..16: note = Antisense oligonucleotide
  modified_base 1..2: mod_base = OTHER; note = misc_feature - bicyclic nucleic acid scaffold modification
  modified_base 5: mod_base = OTHER; note = misc_feature - bicyclic nucleic acid scaffold modification
  modified_base 12: mod_base = OTHER; note = misc_feature - bicyclic nucleic acid scaffold modification
  modified_base 15..16: mod_base = OTHER; note = misc_feature - bicyclic nucleic acid scaffold modification
  source 1..16: mol_type = other RNA
tgttgcctccggttct

SEQ ID NO: 4628 - RNA, 16 nt, synthetic construct
  modified_base 1: mod_base = OTHER; note = thymine
  modified_base 16: mod_base = OTHER; note = thymine
  misc_feature 1..16: note = Antisense oligonucleotide
  modified_base 1..2: mod_base = OTHER; note = misc_feature - bicyclic nucleic acid scaffold modification
  modified_base 9: mod_base = OTHER; note = misc_feature - bicyclic nucleic acid scaffold modification
  modified_base 15..16: mod_base = OTHER; note = misc_feature - bicyclic nucleic acid scaffold modification
  source 1..16: mol_type = other RNA
tgttgcctccggttct

SEQ ID NO: 4629 - RNA, 16 nt, synthetic construct
  modified_base 1: mod_base = OTHER; note = thymine
  modified_base 16: mod_base = OTHER; note = thymine
  misc_feature 1..16: note = Antisense oligonucleotide
  modified_base 1..2: mod_base = OTHER; note = misc_feature - bicyclic nucleic acid scaffold modification
  modified_base 7: mod_base = OTHER; note = misc_feature - bicyclic nucleic acid scaffold modification
  modified_base 15..16: mod_base = OTHER; note = misc_feature - bicyclic nucleic acid scaffold modification
  source 1..16: mol_type = other RNA
tgttgcctccggttct

SEQ ID NO: 4630 - RNA, 16 nt, synthetic construct
  modified_base 1: mod_base = OTHER; note = thymine
  modified_base 16: mod_base = OTHER; note = thymine
  misc_feature 1..16: note = Antisense oligonucleotide
  modified_base 1..2: mod_base = OTHER; note = misc_feature - bicyclic nucleic acid scaffold modification
  modified_base 7: mod_base = OTHER; note = misc_feature - bicyclic nucleic acid scaffold modification
  modified_base 9: mod_base = OTHER; note = misc_feature - bicyclic nucleic acid scaffold modification
  modified_base 15..16: mod_base = OTHER; note = misc_feature - bicyclic nucleic acid scaffold modification
  source 1..16: mol_type = other RNA
tgttgcctccggttct

SEQ ID NO: 4631 - RNA, 25 nt, synthetic construct
  misc_feature 1..25: note = Antisense oligonucleotide
  modified_base 1: mod_base = OTHER; note = misc_feature - bicyclic nucleic acid scaffold modification
  modified_base 4: mod_base = OTHER; note = misc_feature - bicyclic nucleic acid scaffold modification
  modified_base 25: mod_base = OTHER; note = misc_feature - bicyclic nucleic acid scaffold modification
  source 1..25: mol_type = other RNA
gttgcctccggttctgaaggtgttc

SEQ ID NO: 4632 - RNA, 25 nt, synthetic construct
  misc_feature 1..25: note = Antisense oligonucleotide
  modified_base 1: mod_base = OTHER; note = misc_feature - bicyclic nucleic acid scaffold modification
  modified_base 11: mod_base = OTHER; note = misc_feature - bicyclic nucleic acid scaffold modification
  modified_base 25: mod_base = OTHER; note = misc_feature - bicyclic nucleic acid scaffold modification
  source 1..25: mol_type = other RNA
gttgcctccggttctgaaggtgttc

SEQ ID NO: 4633 - RNA, 25 nt, synthetic construct
  misc_feature 1..25: note = Antisense oligonucleotide
  modified_base 1: mod_base = OTHER; note = misc_feature - bicyclic nucleic acid scaffold modification
  modified_base 16: mod_base = OTHER; note = misc_feature - bicyclic nucleic acid scaffold modification
  modified_base 25: mod_base = OTHER; note = misc_feature - bicyclic nucleic acid scaffold modification
  source 1..25: mol_type = other RNA
gttgcctccggttctgaaggtgttc

SEQ ID NO: 4634 - RNA, 25 nt, synthetic construct
  misc_feature 1..25: note = Antisense oligonucleotide
  modified_base 1: mod_base = OTHER; note = misc_feature - bicyclic nucleic acid scaffold modification
  modified_base 20: mod_base = OTHER; note = misc_feature - bicyclic nucleic acid scaffold modification
  modified_base 25: mod_base = OTHER; note = misc_feature - bicyclic nucleic acid scaffold modification
  source 1..25: mol_type = other RNA
gttgcctccggttctgaaggtgttc

SEQ ID NO: 4635 - RNA, 25 nt, synthetic construct
  misc_feature 1..25: note = Antisense oligonucleotide
  modified_base 1: mod_base = OTHER; note = misc_feature - bicyclic nucleic acid scaffold modification
  modified_base 22: mod_base = OTHER; note = misc_feature - bicyclic nucleic acid scaffold modification
  modified_base 25: mod_base = OTHER; note = misc_feature - bicyclic nucleic acid scaffold modification
  source 1..25: mol_type = other RNA
gttgcctccggttctgaaggtgttc

SEQ ID NO: 4636 - RNA, 25 nt, synthetic construct
  misc_feature 1..25: note = Antisense oligonucleotide
  modified_base 1: mod_base = OTHER; note = misc_feature - bicyclic nucleic acid scaffold modification
  modified_base 16: mod_base = OTHER; note = misc_feature - bicyclic nucleic acid scaffold modification
  modified_base 22: mod_base = OTHER; note = misc_feature - bicyclic nucleic acid scaffold modification
  modified_base 25: mod_base = OTHER; note = misc_feature - bicyclic nucleic acid scaffold modification
  source 1..25: mol_type = other RNA
gttgcctccggttctgaaggtgttc

SEQ ID NO: 4637 - RNA, 25 nt, synthetic construct
  misc_feature 1..25: note = Antisense oligonucleotide
  modified_base 1: mod_base = OTHER; note = misc_feature - bicyclic nucleic acid scaffold modification
  modified_base 11: mod_base = OTHER; note = misc_feature - bicyclic nucleic acid scaffold modification
  modified_base 16: mod_base = OTHER; note = misc_feature - bicyclic nucleic acid scaffold modification
  modified_base 25: mod_base = OTHER; note = misc_feature - bicyclic nucleic acid scaffold modification
  source 1..25: mol_type = other RNA
gttgcctccggttctgaaggtgttc

SEQ ID NO: 4638 - RNA, 25 nt, synthetic construct
  misc_feature 1..25: note = Antisense oligonucleotide
  modified_base 1: mod_base = OTHER; note = misc_feature - bicyclic nucleic acid scaffold modification
  modified_base 4: mod_base = OTHER; note = misc_feature - bicyclic nucleic acid scaffold modification
  modified_base 11: mod_base = OTHER; note = misc_feature - bicyclic nucleic acid scaffold modification
  modified_base 25: mod_base = OTHER; note = misc_feature - bicyclic nucleic acid scaffold modification
  source 1..25: mol_type = other RNA
gttgcctccggttctgaaggtgttc

SEQ ID NO: 4639 - RNA, 25 nt, synthetic construct
  misc_feature 1..25: note = Antisense oligonucleotide
  modified_base 1: mod_base = OTHER; note = misc_feature - bicyclic nucleic acid scaffold modification
  modified_base 4: mod_base = OTHER; note = misc_feature - bicyclic nucleic acid scaffold modification
  modified_base 22: mod_base = OTHER; note = misc_feature - bicyclic nucleic acid scaffold modification
  modified_base 25: mod_base = OTHER; note = misc_feature - bicyclic nucleic acid scaffold modification
  source 1..25: mol_type = other RNA
gttgcctccggttctgaaggtgttc

SEQ ID NO: 4640 - RNA, 25 nt, synthetic construct
  misc_feature 1..25: note = Antisense oligonucleotide
  modified_base 1: mod_base = OTHER; note = misc_feature - bicyclic nucleic acid scaffold modification
  modified_base 14: mod_base = OTHER; note = misc_feature - bicyclic nucleic acid scaffold modification
  modified_base 25: mod_base = OTHER; note = misc_feature - bicyclic nucleic acid scaffold modification
  source 1..25: mol_type = other RNA
gttgcctccggttctgaaggtgttc

SEQ ID NO: 4641 - RNA, 25 nt, synthetic construct
  misc_feature 1..25: note = Antisense oligonucleotide
  modified_base 1: mod_base = OTHER; note = misc_feature - bicyclic nucleic acid scaffold modification
  modified_base 6: mod_base = OTHER; note = misc_feature - bicyclic nucleic acid scaffold modification
  modified_base 25: mod_base = OTHER; note = misc_feature - bicyclic nucleic acid scaffold modification
  source 1..25: mol_type = other RNA
gttgcctccggttctgaaggtgttc

SEQ ID NO: 4642 - RNA, 25 nt, synthetic construct
  misc_feature 1..25: note = Antisense oligonucleotide
  modified_base 1: mod_base = OTHER; note = misc_feature - bicyclic nucleic acid scaffold modification
  modified_base 8: mod_base = OTHER; note = misc_feature - bicyclic nucleic acid scaffold modification
  modified_base 25: mod_base = OTHER; note = misc_feature - bicyclic nucleic acid scaffold modification
  source 1..25: mol_type = other RNA
gttgcctccggttctgaaggtgttc

SEQ ID NO: 4643 - RNA, 25 nt, synthetic construct
  misc_feature 1..25: note = Antisense oligonucleotide
  modified_base 1: mod_base = OTHER; note = misc_feature - bicyclic nucleic acid scaffold modification
  modified_base 8: mod_base = OTHER; note = misc_feature - bicyclic nucleic acid scaffold modification
  modified_base 14: mod_base = OTHER; note = misc_feature - bicyclic nucleic acid scaffold modification
  modified_base 25: mod_base = OTHER; note = misc_feature - bicyclic nucleic acid scaffold modification
  source 1..25: mol_type = other RNA
gttgcctccggttctgaaggtgttc

SEQ ID NO: 4644 - RNA, 25 nt, synthetic construct
  modified_base 2: mod_base = OTHER; note = thymine
  modified_base 24: mod_base = OTHER; note = thymine
  misc_feature 1..25: note = Antisense oligonucleotide
  modified_base 1..2: mod_base = OTHER; note = misc_feature - bicyclic nucleic acid scaffold modification
  modified_base 24..25: mod_base = OTHER; note = misc_feature - bicyclic nucleic acid scaffold modification
  source 1..25: mol_type = other RNA
gttgcctccggttctgaaggtgttc

SEQ ID NO: 4645 - RNA, 25 nt, synthetic construct
  modified_base 2: mod_base = OTHER; note = thymine
  modified_base 24: mod_base = OTHER; note = thymine
  misc_feature 1..25: note = Antisense oligonucleotide
  modified_base 1..2: mod_base = OTHER; note = misc_feature - bicyclic nucleic acid scaffold modification
  modified_base 11: mod_base = OTHER; note = misc_feature - bicyclic nucleic acid scaffold modification
  modified_base 24..25: mod_base = OTHER; note = misc_feature - bicyclic nucleic acid scaffold modification
  source 1..25: mol_type = other RNA
gttgcctccggttctgaaggtgttc

SEQ ID NO: 4646 - RNA, 25 nt, synthetic construct
  modified_base 2: mod_base = OTHER; note = thymine
  modified_base 24: mod_base = OTHER; note = thymine
  misc_feature 1..25: note = Antisense oligonucleotide
  modified_base 1..2: mod_base = OTHER; note = misc_feature - bicyclic nucleic acid scaffold modification
  modified_base 16: mod_base = OTHER; note = misc_feature - bicyclic nucleic acid scaffold modification
  modified_base 24..25: mod_base = OTHER; note = misc_feature - bicyclic nucleic acid scaffold modification
  source 1..25: mol_type = other RNA
gttgcctccggttctgaaggtgttc

SEQ ID NO: 4647 - RNA, 25 nt, synthetic construct
  modified_base 2: mod_base = OTHER; note = thymine
  modified_base 24: mod_base = OTHER; note = thymine
  misc_feature 1..25: note = Antisense oligonucleotide
  modified_base 1..2: mod_base = OTHER; note = misc_feature - bicyclic nucleic acid scaffold modification
  modified_base 14: mod_base = OTHER; note = misc_feature - bicyclic nucleic acid scaffold modification
  modified_base 24..25: mod_base = OTHER; note = misc_feature - bicyclic nucleic acid scaffold modification
  source 1..25: mol_type = other RNA
gttgcctccggttctgaaggtgttc

SEQ ID NO: 4648 - RNA, 22 nt, synthetic construct
  misc_feature 1..22: note = Antisense oligonucleotide
  modified_base 1: mod_base = OTHER; note = misc_feature - bicyclic nucleic acid scaffold modification
  modified_base 22: mod_base = OTHER; note = misc_feature - bicyclic nucleic acid scaffold modification
  source 1..22: mol_type = other RNA
gttgcctccggttctgaaggtg

SEQ ID NO: 4649 - RNA, 22 nt, synthetic construct
  misc_feature 1..22: note = Antisense oligonucleotide
  modified_base 1: mod_base = OTHER; note = misc_feature - bicyclic nucleic acid scaffold modification
  modified_base 4: mod_base = OTHER; note = misc_feature - bicyclic nucleic acid scaffold modification
  modified_base 22: mod_base = OTHER; note = misc_feature - bicyclic nucleic acid scaffold modification
  source 1..22: mol_type = other RNA
gttgcctccggttctgaaggtg

SEQ ID NO: 4650 - RNA, 22 nt, synthetic construct
  misc_feature 1..22: note = Antisense oligonucleotide
  modified_base 1: mod_base = OTHER; note = misc_feature - bicyclic nucleic acid scaffold modification
  modified_base 11: mod_base = OTHER; note = misc_feature - bicyclic nucleic acid scaffold modification
  modified_base 22: mod_base = OTHER; note = misc_feature - bicyclic nucleic acid scaffold modification
  source 1..22: mol_type = other RNA
gttgcctccggttctgaaggtg

SEQ ID NO: 4651 - RNA, 22 nt, synthetic construct
  misc_feature 1..22: note = Antisense oligonucleotide
  modified_base 1: mod_base = OTHER; note = misc_feature - bicyclic nucleic acid scaffold modification
  modified_base 16: mod_base = OTHER; note = misc_feature - bicyclic nucleic acid scaffold modification
  modified_base 22: mod_base = OTHER; note = misc_feature - bicyclic nucleic acid scaffold modification
  source 1..22: mol_type = other RNA
gttgcctccggttctgaaggtg

SEQ ID NO: 4652 - RNA, 22 nt, synthetic construct
  misc_feature 1..22: note = Antisense oligonucleotide
  modified_base 1: mod_base = OTHER; note = misc_feature - bicyclic nucleic acid scaffold modification
  modified_base 20: mod_base = OTHER; note = misc_feature - bicyclic nucleic acid scaffold modification
  modified_base 22: mod_base = OTHER; note = misc_feature - bicyclic nucleic acid scaffold modification
  source 1..22: mol_type = other RNA
gttgcctccggttctgaaggtg

SEQ ID NO: 4653 - RNA, 22 nt, synthetic construct
  misc_feature 1..22: note = Antisense oligonucleotide
  modified_base 1: mod_base = OTHER; note = misc_feature - bicyclic nucleic acid scaffold modification
  modified_base 16: mod_base = OTHER; note = misc_feature - bicyclic nucleic acid scaffold modification
  modified_base 20: mod_base = OTHER; note = misc_feature - bicyclic nucleic acid scaffold modification
  modified_base 22: mod_base = OTHER; note = misc_feature - bicyclic nucleic acid scaffold modification
  source 1..22: mol_type = other RNA
gttgcctccggttctgaaggtg

SEQ ID NO: 4654 - RNA, 22 nt, synthetic construct
  misc_feature 1..22: note = Antisense oligonucleotide
  modified_base 1: mod_base = OTHER; note = misc_feature - bicyclic nucleic acid scaffold modification
  modified_base 11: mod_base = OTHER; note = misc_feature - bicyclic nucleic acid scaffold modification
  modified_base 16: mod_base = OTHER; note = misc_feature - bicyclic nucleic acid scaffold modification
  modified_base 22: mod_base = OTHER; note = misc_feature - bicyclic nucleic acid scaffold modification
  source 1..22: mol_type = other RNA
gttgcctccggttctgaaggtg

SEQ ID NO: 4655 - RNA, 22 nt, synthetic construct
  misc_feature 1..22: note = Antisense oligonucleotide
  modified_base 1: mod_base = OTHER; note = misc_feature - bicyclic nucleic acid scaffold modification
  modified_base 4: mod_base = OTHER; note = misc_feature - bicyclic nucleic acid scaffold modification
  modified_base 11: mod_base = OTHER; note = misc_feature - bicyclic nucleic acid scaffold modification
  modified_base 22: mod_base = OTHER; note = misc_feature - bicyclic nucleic acid scaffold modification
  source 1..22: mol_type = other RNA
gttgcctccggttctgaaggtg

SEQ ID NO: 4656 - RNA, 22 nt, synthetic construct
  misc_feature 1..22: note = Antisense oligonucleotide
  modified_base 1: mod_base = OTHER; note = misc_feature - bicyclic nucleic acid scaffold modification
  modified_base 14: mod_base = OTHER; note = misc_feature - bicyclic nucleic acid scaffold modification
  modified_base 22: mod_base = OTHER; note = misc_feature - bicyclic nucleic acid scaffold modification
  source 1..22: mol_type = other RNA
gttgcctccggttctgaaggtg

SEQ ID NO: 4657 - RNA, 22 nt, synthetic construct
  misc_feature 1..22: note = Antisense oligonucleotide
  modified_base 1: mod_base = OTHER; note = misc_feature - bicyclic nucleic acid scaffold modification
  modified_base 8: mod_base = OTHER; note = misc_feature - bicyclic nucleic acid scaffold modification
  modified_base 22: mod_base = OTHER; note = misc_feature - bicyclic nucleic acid scaffold modification
  source 1..22: mol_type = other RNA
gttgcctccggttctgaaggtg

SEQ ID NO: 4658 - RNA, 22 nt, synthetic construct
  misc_feature 1..22: note = Antisense oligonucleotide
  modified_base 1: mod_base = OTHER; note = misc_feature - bicyclic nucleic acid scaffold modification
  modified_base 6: mod_base = OTHER; note = misc_feature - bicyclic nucleic acid scaffold modification
  modified_base 14: mod_base = OTHER; note = misc_feature - bicyclic nucleic acid scaffold modification
  modified_base 22: mod_base = OTHER; note = misc_feature - bicyclic nucleic acid scaffold modification
  source 1..22: mol_type = other RNA
gttgcctccggttctgaaggtg

SEQ ID NO: 4659 - RNA, 22 nt, synthetic construct
  modified_base 2: mod_base = OTHER; note = thymine
  modified_base 21: mod_base = OTHER; note = thymine
  misc_feature 1..22: note = Antisense oligonucleotide
  modified_base 1..2: mod_base = OTHER; note = misc_feature - bicyclic nucleic acid scaffold modification
  modified_base 21..22: mod_base = OTHER; note = misc_feature - bicyclic nucleic acid scaffold modification
  source 1..22: mol_type = other RNA
gttgcctccggttctgaaggtg

SEQ ID NO: 4660 - RNA, 22 nt, synthetic construct
  modified_base 2: mod_base = OTHER; note = thymine
  modified_base 21: mod_base = OTHER; note = thymine
  misc_feature 1..22: note = Antisense oligonucleotide
  modified_base 1..2: mod_base = OTHER; note = misc_feature - bicyclic nucleic acid scaffold modification
  modified_base 16: mod_base = OTHER; note = misc_feature - bicyclic nucleic acid scaffold modification
  modified_base 21..22: mod_base = OTHER; note = misc_feature - bicyclic nucleic acid scaffold modification
  source 1..22: mol_type = other RNA
gttgcctccggttctgaaggtg

SEQ ID NO: 4661 - RNA, 22 nt, synthetic construct
  modified_base 2: mod_base = OTHER; note = thymine
  modified_base 21: mod_base = OTHER; note = thymine
  misc_feature 1..22: note = Antisense oligonucleotide
  modified_base 1..2: mod_base = OTHER; note = misc_feature - bicyclic nucleic acid scaffold modification
  modified_base 14: mod_base = OTHER; note = misc_feature - bicyclic nucleic acid scaffold modification
  modified_base 21..22: mod_base = OTHER; note = misc_feature - bicyclic nucleic acid scaffold modification
  source 1..22: mol_type = other RNA
gttgcctccggttctgaaggtg

SEQ ID NO: 4662 - RNA, 22 nt, synthetic construct
  modified_base 2: mod_base = OTHER; note = thymine
  modified_base 21: mod_base = OTHER; note = thymine
  misc_feature 1..22: note = Antisense oligonucleotide
  modified_base 1..2: mod_base = OTHER; note = misc_feature - bicyclic nucleic acid scaffold modification
  modified_base 6: mod_base = OTHER; note = misc_feature - bicyclic nucleic acid scaffold modification
  modified_base 21..22: mod_base = OTHER; note = misc_feature - bicyclic nucleic acid scaffold modification
  source 1..22: mol_type = other RNA
gttgcctccggttctgaaggtg

SEQ ID NO: 4663 - RNA, 22 nt, synthetic construct
  modified_base 1: mod_base = OTHER; note = thymine
  modified_base 22: mod_base = OTHER; note = thymine
  misc_feature 1..22: note = Antisense oligonucleotide
  modified_base 1: mod_base = OTHER; note = misc_feature - bicyclic nucleic acid scaffold modification
  modified_base 22: mod_base = OTHER; note = misc_feature - bicyclic nucleic acid scaffold modification
  source 1..22: mol_type = other RNA
ttgcctccggttctgaaggtgt

SEQ ID NO: 4664 - RNA, 22 nt, synthetic construct
  modified_base 1: mod_base = OTHER; note = thymine
  modified_base 22: mod_base = OTHER; note = thymine
  misc_feature 1..22: note = Antisense oligonucleotide
  modified_base 1: mod_base = OTHER; note = misc_feature - bicyclic nucleic acid scaffold modification
  modified_base 3: mod_base = OTHER; note = misc_feature - bicyclic nucleic acid scaffold modification
  modified_base 22: mod_base = OTHER; note = misc_feature - bicyclic nucleic acid scaffold modification
  source 1..22: mol_type = other RNA
ttgcctccggttctgaaggtgt

SEQ ID NO: 4665 - RNA, 22 nt, synthetic construct
  modified_base 1: mod_base = OTHER; note = thymine
  modified_base 22: mod_base = OTHER; note = thymine
  misc_feature 1..22: note = Antisense oligonucleotide
  modified_base 1: mod_base = OTHER; note = misc_feature - bicyclic nucleic acid scaffold modification
  modified_base 10: mod_base = OTHER; note = misc_feature - bicyclic nucleic acid scaffold modification
  modified_base 22: mod_base = OTHER; note = misc_feature - bicyclic nucleic acid scaffold modification
  source 1..22: mol_type = other RNA
ttgcctccggttctgaaggtgt

SEQ ID NO: 4666 - RNA, 22 nt, synthetic construct
  modified_base 1: mod_base = OTHER; note = thymine
  modified_base 22: mod_base = OTHER; note = thymine
  misc_feature 1..22: note = Antisense oligonucleotide
  modified_base 1: mod_base = OTHER; note = misc_feature - bicyclic nucleic acid scaffold modification
  modified_base 15: mod_base = OTHER; note = misc_feature - bicyclic nucleic acid scaffold modification
  modified_base 22: mod_base = OTHER; note = misc_feature - bicyclic nucleic acid scaffold modification
  source 1..22: mol_type = other RNA
ttgcctccggttctgaaggtgt

SEQ ID NO: 4667 - RNA, 22 nt, synthetic construct
  modified_base 1: mod_base = OTHER; note = thymine
  modified_base 22: mod_base = OTHER; note = thymine
  misc_feature 1..22: note = Antisense oligonucleotide
  modified_base 1: mod_base = OTHER; note = misc_feature - bicyclic nucleic acid scaffold modification
  modified_base 19: mod_base = OTHER; note = misc_feature - bicyclic nucleic acid scaffold modification
  modified_base 22: mod_base = OTHER; note = misc_feature - bicyclic nucleic acid scaffold modification
  source 1..22: mol_type = other RNA
ttgcctccggttctgaaggtgt

SEQ ID NO: 4668 - RNA, 22 nt, synthetic construct
  modified_base 1: mod_base = OTHER; note = thymine
  modified_base 22: mod_base = OTHER; note = thymine
  misc_feature 1..22: note = Antisense oligonucleotide
  modified_base 1: mod_base = OTHER; note = misc_feature - bicyclic nucleic acid scaffold modification
  modified_base 3: mod_base = OTHER; note = misc_feature - bicyclic nucleic acid scaffold modification
  modified_base 19: mod_base = OTHER; note = misc_feature - bicyclic nucleic acid scaffold modification
  modified_base 22: mod_base = OTHER; note = misc_feature - bicyclic nucleic acid scaffold modification
  source 1..22: mol_type = other RNA
ttgcctccggttctgaaggtgt

SEQ ID NO: 4669 - RNA, 22 nt, synthetic construct
  modified_base 1: mod_base = OTHER; note = thymine
  modified_base 22: mod_base = OTHER; note = thymine
  misc_feature 1..22: note = Antisense oligonucleotide
  modified_base 1: mod_base = OTHER; note = misc_feature - bicyclic nucleic acid scaffold modification
  modified_base 10: mod_base = OTHER; note = misc_feature - bicyclic nucleic acid scaffold modification
  modified_base 15: mod_base = OTHER; note = misc_feature - bicyclic nucleic acid scaffold modification
  modified_base 22: mod_base = OTHER; note = misc_feature - bicyclic nucleic acid scaffold modification
  source 1..22: mol_type = other RNA
ttgcctccggttctgaaggtgt

SEQ ID NO: 4670 - RNA, 22 nt, synthetic construct
  modified_base 1: mod_base = OTHER; note = thymine
  modified_base 22: mod_base = OTHER; note = thymine
  misc_feature 1..22: note = Antisense oligonucleotide
  modified_base 1: mod_base = OTHER; note = misc_feature - bicyclic nucleic acid scaffold modification
  modified_base 13: mod_base = OTHER; note = misc_feature - bicyclic nucleic acid scaffold modification
  modified_base 22: mod_base = OTHER; note = misc_feature - bicyclic nucleic acid scaffold modification
  source 1..22: mol_type = other RNA
ttgcctccggttctgaaggtgt

SEQ ID NO: 4671 - RNA, 22 nt, synthetic construct
  modified_base 1: mod_base = OTHER; note = thymine
  modified_base 22: mod_base = OTHER; note = thymine
  misc_feature 1..22: note = Antisense oligonucleotide
  modified_base 1: mod_base = OTHER; note = misc_feature - bicyclic nucleic acid scaffold modification
  modified_base 5: mod_base = OTHER; note = misc_feature - bicyclic nucleic acid scaffold modification
  modified_base 22: mod_base = OTHER; note = misc_feature - bicyclic nucleic acid scaffold modification
  source 1..22: mol_type = other RNA
ttgcctccggttctgaaggtgt

SEQ ID NO: 4672 - RNA, 22 nt, synthetic construct
  modified_base 1: mod_base = OTHER; note = thymine
  modified_base 22: mod_base = OTHER; note = thymine
  misc_feature 1..22: note = Antisense oligonucleotide
  modified_base 1: mod_base = OTHER; note = misc_feature - bicyclic nucleic acid scaffold modification
  modified_base 5: mod_base = OTHER; note = misc_feature - bicyclic nucleic acid scaffold modification
  modified_base 13: mod_base = OTHER; note = misc_feature - bicyclic nucleic acid scaffold modification
  modified_base 22: mod_base = OTHER; note = misc_feature - bicyclic nucleic acid scaffold modification
  source 1..22: mol_type = other RNA
ttgcctccggttctgaaggtgt

SEQ ID NO: 4673 - RNA, 22 nt, synthetic construct
  modified_base 1: mod_base = OTHER; note = thymine
  modified_base 22: mod_base = OTHER; note = thymine
  misc_feature 1..22: note = Antisense oligonucleotide
  modified_base 1: mod_base = OTHER; note = misc_feature - bicyclic nucleic acid scaffold modification
  modified_base 5: mod_base = OTHER; note = misc_feature - bicyclic nucleic acid scaffold modification
  modified_base 18: mod_base = OTHER; note = misc_feature - bicyclic nucleic acid scaffold modification
  modified_base 22: mod_base = OTHER; note = misc_feature - bicyclic nucleic acid scaffold modification
  source 1..22: mol_type = other RNA
ttgcctccggttctgaaggtgt

SEQ ID NO: 4674 - RNA, 22 nt, synthetic construct
  modified_base 1..2: mod_base = OTHER; note = thymine
  modified_base 22: mod_base = OTHER; note = thymine
  misc_feature 1..22: note = Antisense oligonucleotide
  modified_base 1..2: mod_base = OTHER; note = misc_feature - bicyclic nucleic acid scaffold modification
  modified_base 21..22: mod_base = OTHER; note = misc_feature - bicyclic nucleic acid scaffold modification
  source 1..22: mol_type = other RNA
ttgcctccggttctgaaggtgt

SEQ ID NO: 4675 - RNA, 22 nt, synthetic construct
  modified_base 1..2: mod_base = OTHER; note = thymine
  modified_base 22: mod_base = OTHER; note = thymine
  misc_feature 1..22: note = Antisense oligonucleotide
  modified_base 1..2: mod_base = OTHER; note = misc_feature - bicyclic nucleic acid scaffold modification
  modified_base 15: mod_base = OTHER; note = misc_feature - bicyclic nucleic acid scaffold modification
  modified_base 21..22: mod_base = OTHER; note = misc_feature - bicyclic nucleic acid scaffold modification
  source 1..22: mol_type = other RNA
ttgcctccggttctgaaggtgt

SEQ ID NO: 4676 - RNA, 22 nt, synthetic construct
  modified_base 1..2: mod_base = OTHER; note = thymine
  modified_base 22: mod_base = OTHER; note = thymine
  misc_feature 1..22: note = Antisense oligonucleotide
  modified_base 1..2: mod_base = OTHER; note = misc_feature - bicyclic nucleic acid scaffold modification
  modified_base 13: mod_base = OTHER; note = misc_feature - bicyclic nucleic acid scaffold modification
  modified_base 21..22: mod_base = OTHER; note = misc_feature - bicyclic nucleic acid scaffold modification
  source 1..22: mol_type = other RNA
ttgcctccggttctgaaggtgt

SEQ ID NO: 4677 - RNA, 22 nt, synthetic construct
  modified_base 1..2: mod_base = OTHER; note = thymine
  modified_base 22: mod_base = OTHER; note = thymine
  misc_feature 1..22: note = Antisense oligonucleotide
  modified_base 1..2: mod_base = OTHER; note = misc_feature - bicyclic nucleic acid scaffold modification
  modified_base 10: mod_base = OTHER; note = misc_feature - bicyclic nucleic acid scaffold modification
  modified_base 15: mod_base = OTHER; note = misc_feature - bicyclic nucleic acid scaffold modification
  modified_base 21..22: mod_base = OTHER; note = misc_feature - bicyclic nucleic acid scaffold modification
  source 1..22: mol_type = other RNA
ttgcctccggttctgaaggtgt

SEQ ID NO: 4678 - RNA, 22 nt, synthetic construct
  modified_base 1: mod_base = OTHER; note = thymine
  modified_base 22: mod_base = OTHER; note = thymine
  misc_feature 1..22: note = Antisense oligonucleotide
  modified_base 1: mod_base = OTHER; note = misc_feature - bicyclic nucleic acid scaffold modification
  modified_base 22: mod_base = OTHER; note = misc_feature - bicyclic nucleic acid scaffold modification
  source 1..22: mol_type = other RNA
tgcctccggttctgaaggtgtt

SEQ ID NO: 4679 - RNA, 22 nt, synthetic construct
  modified_base 1: mod_base = OTHER; note = thymine
  modified_base 22: mod_base = OTHER; note = thymine
  misc_feature 1..22: note = Antisense oligonucleotide
  modified_base 1: mod_base = OTHER; note = misc_feature - bicyclic nucleic acid scaffold modification
  modified_base 4: mod_base = OTHER; note = misc_feature - bicyclic nucleic acid scaffold modification
  modified_base 22: mod_base = OTHER; note = misc_feature - bicyclic nucleic acid scaffold modification
  source 1..22: mol_type = other RNA
tgcctccggttctgaaggtgtt

SEQ ID NO: 4680 - RNA, 22 nt, synthetic construct
  modified_base 1: mod_base = OTHER; note = thymine
  modified_base 22: mod_base = OTHER; note = thymine
  misc_feature 1..22: note = Antisense oligonucleotide
  modified_base 1: mod_base = OTHER; note = misc_feature - bicyclic nucleic acid scaffold modification
  modified_base 9: mod_base = OTHER; note = misc_feature - bicyclic nucleic acid scaffold modification
  modified_base 22: mod_base = OTHER; note = misc_feature - bicyclic nucleic acid scaffold modification
  source 1..22: mol_type = other RNA
tgcctccggttctgaaggtgtt

SEQ ID NO: 4681 - RNA, 22 nt, synthetic construct
  modified_base 1: mod_base = OTHER; note = thymine
  modified_base 22: mod_base = OTHER; note = thymine
  misc_feature 1..22: note = Antisense oligonucleotide
  modified_base 1: mod_base = OTHER; note = misc_feature - bicyclic nucleic acid scaffold modification
  modified_base 12: mod_base = OTHER; note = misc_feature - bicyclic nucleic acid scaffold modification
  modified_base 22: mod_base = OTHER; note = misc_feature - bicyclic nucleic acid scaffold modification
  source 1..22: mol_type = other RNA
tgcctccggttctgaaggtgtt

SEQ ID NO: 4682 - RNA, 22 nt, synthetic construct
  modified_base 1: mod_base = OTHER; note = thymine
  modified_base 22: mod_base = OTHER; note = thymine
  misc_feature 1..22: note = Antisense oligonucleotide
  modified_base 1: mod_base = OTHER; note = misc_feature - bicyclic nucleic acid scaffold modification
  modified_base 14: mod_base = OTHER; note = misc_feature - bicyclic nucleic acid scaffold modification
  modified_base 22: mod_base = OTHER; note = misc_feature - bicyclic nucleic acid scaffold modification
  source 1..22: mol_type = other RNA
tgcctccggttctgaaggtgtt

SEQ ID NO: 4683 - RNA, 22 nt, synthetic construct
  modified_base 1: mod_base = OTHER; note = thymine
  modified_base 22: mod_base = OTHER; note = thymine
  misc_feature 1..22: note = Antisense oligonucleotide
  modified_base 1: mod_base = OTHER; note = misc_feature - bicyclic nucleic acid scaffold modification
  modified_base 17: mod_base = OTHER; note = misc_feature - bicyclic nucleic acid scaffold modification
  modified_base 22: mod_base = OTHER; note = misc_feature - bicyclic nucleic acid scaffold modification
  source 1..22: mol_type = other RNA
tgcctccggttctgaaggtgtt

SEQ ID NO: 4684 - RNA, 22 nt, synthetic construct
  modified_base 1: mod_base = OTHER; note = thymine
  modified_base 22: mod_base = OTHER; note = thymine
  misc_feature 1..22: note = Antisense oligonucleotide
  modified_base 1: mod_base = OTHER; note = misc_feature - bicyclic nucleic acid scaffold modification
  modified_base 18: mod_base = OTHER; note = misc_feature - bicyclic nucleic acid scaffold modification
  modified_base 22: mod_base = OTHER; note = misc_feature - bicyclic nucleic acid scaffold modification
  source 1..22: mol_type = other RNA
tgcctccggttctgaaggtgtt

SEQ ID NO: 4685 - RNA, 22 nt, synthetic construct
  modified_base 1: mod_base = OTHER; note = thymine
  modified_base 22: mod_base = OTHER; note = thymine
  misc_feature 1..22: note = Antisense oligonucleotide
  modified_base 1: mod_base = OTHER; note = misc_feature - bicyclic nucleic acid scaffold modification
  modified_base 20: mod_base = OTHER; note = misc_feature - bicyclic nucleic acid scaffold modification
  modified_base 22: mod_base = OTHER; note = misc_feature - bicyclic nucleic acid scaffold modification
  source 1..22: mol_type = other RNA
tgcctccggttctgaaggtgtt

SEQ ID NO: 4686 - RNA, 22 nt, synthetic construct
  modified_base 1: mod_base = OTHER; note = thymine
  modified_base 22: mod_base = OTHER; note = thymine
  misc_feature 1..22: note = Antisense oligonucleotide
  modified_base 1: mod_base = OTHER; note = misc_feature - bicyclic nucleic acid scaffold modification
  modified_base 4: mod_base = OTHER; note = misc_feature - bicyclic nucleic acid scaffold modification
  modified_base 20: mod_base = OTHER; note = misc_feature - bicyclic nucleic acid scaffold modification
  modified_base 22: mod_base = OTHER; note = misc_feature - bicyclic nucleic acid scaffold modification
  source 1..22: mol_type = other RNA
tgcctccggttctgaaggtgtt

SEQ ID NO: 4687 - RNA, 22 nt, synthetic construct
  modified_base 1: mod_base = OTHER; note = thymine
  modified_base 22: mod_base = OTHER; note = thymine
  misc_feature 1..22: note = Antisense oligonucleotide
  modified_base 1: mod_base = OTHER; note = misc_feature - bicyclic nucleic acid scaffold modification
  modified_base 9: mod_base = OTHER; note = misc_feature - bicyclic nucleic acid scaffold modification
  modified_base 14: mod_base = OTHER; note = misc_feature - bicyclic nucleic acid scaffold modification
  modified_base 22: mod_base = OTHER; note = misc_feature - bicyclic nucleic acid scaffold modification
  source 1..22: mol_type = other RNA
tgcctccggttctgaaggtgtt

SEQ ID NO: 4688 - RNA, 22 nt, synthetic construct
  modified_base 1: mod_base = OTHER; note = thymine
  modified_base 22: mod_base = OTHER; note = thymine
  misc_feature 1..22: note = Antisense oligonucleotide
  modified_base 1: mod_base = OTHER; note = misc_feature - bicyclic nucleic acid scaffold modification
  modified_base 12: mod_base = OTHER; note = misc_feature - bicyclic nucleic acid scaffold modification
  modified_base 17: mod_base = OTHER; note = misc_feature - bicyclic nucleic acid scaffold modification
  modified_base 22: mod_base = OTHER; note = misc_feature - bicyclic nucleic acid scaffold modification
  source 1..22: mol_type = other RNA
tgcctccggttctgaaggtgtt

SEQ ID NO: 4689 - RNA, 22 nt, synthetic construct
  modified_base 1: mod_base = OTHER; note = thymine
  modified_base 21..22: mod_base = OTHER; note = thymine
  misc_feature 1..22: note = Antisense oligonucleotide
  modified_base 1..2: mod_base = OTHER; note = misc_feature - bicyclic nucleic acid scaffold modification
  modified_base 21..22: mod_base = OTHER; note = misc_feature - bicyclic nucleic acid scaffold modification
  source 1..22: mol_type = other RNA
tgcctccggttctgaaggtgtt

SEQ ID NO: 4690 - RNA, 22 nt, synthetic construct
  modified_base 1: mod_base = OTHER; note = thymine
  modified_base 21..22: mod_base = OTHER; note = thymine
  misc_feature 1..22: note = Antisense oligonucleotide
  modified_base 1..2: mod_base = OTHER; note = misc_feature - bicyclic nucleic acid scaffold modification
  modified_base 9: mod_base = OTHER; note = misc_feature - bicyclic nucleic acid scaffold modification
  modified_base 21..22: mod_base = OTHER; note = misc_feature - bicyclic nucleic acid scaffold modification
  source 1..22: mol_type = other RNA
tgcctccggttctgaaggtgtt

SEQ ID NO: 4691 - RNA, 22 nt, synthetic construct
  modified_base 1: mod_base = OTHER; note = thymine
  modified_base 21..22: mod_base = OTHER; note = thymine
  misc_feature 1..22: note = Antisense oligonucleotide
  modified_base 1..2: mod_base = OTHER; note = misc_feature - bicyclic nucleic acid scaffold modification
  modified_base 14: mod_base = OTHER; note = misc_feature - bicyclic nucleic acid scaffold modification
  modified_base 21..22: mod_base = OTHER; note = misc_feature - bicyclic nucleic acid scaffold modification
  source 1..22: mol_type = other RNA
tgcctccggttctgaaggtgtt

SEQ ID NO: 4692 - RNA, 22 nt, synthetic construct
  modified_base 1: mod_base = OTHER; note = thymine
  modified_base 21..22: mod_base = OTHER; note = thymine
  misc_feature 1..22: note = Antisense oligonucleotide
  modified_base 1..2: mod_base = OTHER; note = misc_feature - bicyclic nucleic acid scaffold modification
  modified_base 4: mod_base = OTHER; note = misc_feature - bicyclic nucleic acid scaffold modification
  modified_base 18: mod_base = OTHER; note = misc_feature - bicyclic nucleic acid scaffold modification
  modified_base 21..22: mod_base = OTHER; note = misc_feature - bicyclic nucleic acid scaffold modification
  source 1..22: mol_type = other RNA
tgcctccggttctgaaggtgtt

SEQ ID NO: 4693 - RNA, 22 nt, synthetic construct
  misc_feature 1..22: note = Antisense oligonucleotide
  modified_base 1: mod_base = OTHER; note = misc_feature - bicyclic nucleic acid scaffold modification
  modified_base 22: mod_base = OTHER; note = misc_feature - bicyclic nucleic acid scaffold modification
  source 1..22: mol_type = other RNA
gcctccggttctgaaggtgttc

SEQ ID NO: 4694 - RNA, 22 nt, synthetic construct
  misc_feature 1..22: note = Antisense oligonucleotide
  modified_base 1: mod_base = OTHER; note = misc_feature - bicyclic nucleic acid scaffold modification
  modified_base 8: mod_base = OTHER; note = misc_feature - bicyclic nucleic acid scaffold modification
  modified_base 22: mod_base = OTHER; note = misc_feature - bicyclic nucleic acid scaffold modification
  source 1..22: mol_type = other RNA
gcctccggttctgaaggtgttc

SEQ ID NO: 4695 - RNA, 22 nt, synthetic construct
  misc_feature 1..22: note = Antisense oligonucleotide
  modified_base 1: mod_base = OTHER; note = misc_feature - bicyclic nucleic acid scaffold modification
  modified_base 13: mod_base = OTHER; note = misc_feature - bicyclic nucleic acid scaffold modification
  modified_base 22: mod_base = OTHER; note = misc_feature - bicyclic nucleic acid scaffold modification
  source 1..22: mol_type = other RNA
gcctccggttctgaaggtgttc

SEQ ID NO: 4696 - RNA, 22 nt, synthetic construct
  misc_feature 1..22: note = Antisense oligonucleotide
  modified_base 1: mod_base = OTHER; note = misc_feature - bicyclic nucleic acid scaffold modification
  modified_base 19: mod_base = OTHER; note = misc_feature - bicyclic nucleic acid scaffold modification
  modified_base 22: mod_base = OTHER; note = misc_feature - bicyclic nucleic acid scaffold modification
  source 1..22: mol_type = other RNA
gcctccggttctgaaggtgttc

SEQ ID NO: 4697 - RNA, 22 nt, synthetic construct
  misc_feature 1..22: note = Antisense oligonucleotide
  modified_base 1: mod_base = OTHER; note = misc_feature - bicyclic nucleic acid scaffold modification
  modified_base 8: mod_base = OTHER; note = misc_feature - bicyclic nucleic acid scaffold modification
  modified_base 19: mod_base = OTHER; note = misc_feature - bicyclic nucleic acid scaffold modification
  modified_base 22: mod_base = OTHER; note = misc_feature - bicyclic nucleic acid scaffold modification
  source 1..22: mol_type = other RNA
gcctccggttctgaaggtgttc

SEQ ID NO: 4698 - RNA, 22 nt, synthetic construct
  misc_feature 1..22: note = Antisense oligonucleotide
  modified_base 1: mod_base = OTHER; note = misc_feature - bicyclic nucleic acid scaffold modification
  modified_base 13: mod_base = OTHER; note = misc_feature - bicyclic nucleic acid scaffold modification
  modified_base 17: mod_base = OTHER; note = misc_feature - bicyclic nucleic acid scaffold modification
  modified_base 22: mod_base = OTHER; note = misc_feature - bicyclic nucleic acid scaffold modification
  source 1..22: mol_type = other RNA
gcctccggttctgaaggtgttc

SEQ ID NO: 4699 - RNA, 22 nt, synthetic construct
  misc_feature 1..22: note = Antisense oligonucleotide
  modified_base 1: mod_base = OTHER; note = misc_feature - bicyclic nucleic acid scaffold modification
  modified_base 11: mod_base = OTHER; note = misc_feature - bicyclic nucleic acid scaffold modification
  modified_base 22: mod_base = OTHER; note = misc_feature - bicyclic nucleic acid scaffold modification
  source 1..22: mol_type = other RNA
gcctccggttctgaaggtgttc

SEQ ID NO: 4700 - RNA, 22 nt, synthetic construct
  misc_feature 1..22: note = Antisense oligonucleotide
  modified_base 1: mod_base = OTHER; note = misc_feature - bicyclic nucleic acid scaffold modification
  modified_base 3: mod_base = OTHER; note = misc_feature - bicyclic nucleic acid scaffold modification
  modified_base 11: mod_base = OTHER; note = misc_feature - bicyclic nucleic acid scaffold modification
  modified_base 22: mod_base = OTHER; note = misc_feature - bicyclic nucleic acid scaffold modification
  source 1..22: mol_type = other RNA
gcctccggttctgaaggtgttc

SEQ ID NO: 4701 - RNA, 22 nt, synthetic construct
  misc_feature 1..22: note = Antisense oligonucleotide
  modified_base 1: mod_base = OTHER; note = misc_feature - bicyclic nucleic acid scaffold modification
  modified_base 5: mod_base = OTHER; note = misc_feature - bicyclic nucleic acid scaffold modification
  modified_base 11: mod_base = OTHER; note = misc_feature - bicyclic nucleic acid scaffold modification
  modified_base 19: mod_base = OTHER; note = misc_feature - bicyclic nucleic acid scaffold modification
  modified_base 22: mod_base = OTHER; note = misc_feature - bicyclic nucleic acid scaffold modification
  source 1..22: mol_type = other RNA
gcctccggttctgaaggtgttc

SEQ ID NO: 4702 - RNA, 22 nt, synthetic construct
  modified_base 21: mod_base = OTHER; note = thymine
  misc_feature 1..22: note = Antisense oligonucleotide
  modified_base 1..2: mod_base = OTHER; note = misc_feature - bicyclic nucleic acid scaffold modification
  modified_base 21..22: mod_base = OTHER; note = misc_feature - bicyclic nucleic acid scaffold modification
  source 1..22: mol_type = other RNA
gcctccggttctgaaggtgttc

SEQ ID NO: 4703 - RNA, 22 nt, synthetic construct
  modified_base 21: mod_base = OTHER; note = thymine
  misc_feature 1..22: note = Antisense oligonucleotide
  modified_base 1..2: mod_base = OTHER; note = misc_feature - bicyclic nucleic acid scaffold modification
  modified_base 11: mod_base = OTHER; note = misc_feature - bicyclic nucleic acid scaffold modification
  modified_base 21..22: mod_base = OTHER; note = misc_feature - bicyclic nucleic acid scaffold modification
  source 1..22: mol_type = other RNA
gcctccggttctgaaggtgttc

SEQ ID NO: 4704 - RNA, 22 nt, synthetic construct
  modified_base 21: mod_base = OTHER; note = thymine
  misc_feature 1..22: note = Antisense oligonucleotide
  modified_base 1..2: mod_base = OTHER; note = misc_feature - bicyclic nucleic acid scaffold modification
  modified_base 13: mod_base = OTHER; note = misc_feature - bicyclic nucleic acid scaffold modification
  modified_base 21..22: mod_base = OTHER; note = misc_feature - bicyclic nucleic acid scaffold modification
  source 1..22: mol_type = other RNA
gcctccggttctgaaggtgttc

SEQ ID NO: 4705 - RNA, 22 nt, synthetic construct
  modified_base 21: mod_base = OTHER; note = thymine
  misc_feature 1..22: note = Antisense oligonucleotide
  modified_base 1..2: mod_base = OTHER; note = misc_feature - bicyclic nucleic acid scaffold modification
  modified_base 8: mod_base = OTHER; note = misc_feature - bicyclic nucleic acid scaffold modification
  modified_base 16: mod_base = OTHER; note = misc_feature - bicyclic nucleic acid scaffold modification
  modified_base 21..22: mod_base = OTHER; note = misc_feature - bicyclic nucleic acid scaffold modification
  source 1..22: mol_type = other RNA
gcctccggttctgaaggtgttc

SEQ ID NO: 4706 - RNA, 20 nt, synthetic construct
  misc_feature 1..20: note = Antisense oligonucleotide
  modified_base 1: mod_base = OTHER; note = misc_feature - bicyclic nucleic acid scaffold modification
  modified_base 20: mod_base = OTHER; note = misc_feature - bicyclic nucleic acid scaffold modification
  source 1..20: mol_type = other RNA
gttgcctccggttctgaagg

SEQ ID NO: 4707 - RNA, 20 nt, synthetic construct
  misc_feature 1..20: note = Antisense oligonucleotide
  modified_base 1: mod_base = OTHER; note = misc_feature - bicyclic nucleic acid scaffold modification
  modified_base 4: mod_base = OTHER; note = misc_feature - bicyclic nucleic acid scaffold modification
  modified_base 20: mod_base = OTHER; note = misc_feature - bicyclic nucleic acid scaffold modification
  source 1..20: mol_type = other RNA
gttgcctccggttctgaagg

SEQ ID NO: 4708 - RNA, 20 nt, synthetic construct
  misc_feature 1..20: note = Antisense oligonucleotide
  modified_base 1: mod_base = OTHER; note = misc_feature - bicyclic nucleic acid scaffold modification
  modified_base 11: mod_base = OTHER; note = misc_feature - bicyclic nucleic acid scaffold modification
  modified_base 20: mod_base = OTHER; note = misc_feature - bicyclic nucleic acid scaffold modification
  source 1..20: mol_type = other RNA
gttgcctccggttctgaagg

SEQ ID NO: 4709 - RNA, 20 nt, synthetic construct
  misc_feature 1..20: note = Antisense oligonucleotide
  modified_base 1: mod_base = OTHER; note = misc_feature - bicyclic nucleic acid scaffold modification
  modified_base 14: mod_base = OTHER; note = misc_feature - bicyclic nucleic acid scaffold modification
  modified_base 20: mod_base = OTHER; note = misc_feature - bicyclic nucleic acid scaffold modification
  source 1..20: mol_type = other RNA
gttgcctccggttctgaagg

SEQ ID NO: 4710 - RNA, 20 nt, synthetic construct
  misc_feature 1..20: note = Antisense oligonucleotide
  modified_base 1: mod_base = OTHER; note = misc_feature - bicyclic nucleic acid scaffold modification
  modified_base 16: mod_base = OTHER; note = misc_feature - bicyclic nucleic acid scaffold modification
  modified_base 20: mod_base = OTHER; note = misc_feature - bicyclic nucleic acid scaffold modification
  source 1..20: mol_type = other RNA
gttgcctccggttctgaagg

SEQ ID NO: 4711 - RNA, 20 nt, synthetic construct
  misc_feature 1..20: note = Antisense oligonucleotide
  modified_base 1: mod_base = OTHER; note = misc_feature - bicyclic nucleic acid scaffold modification
  modified_base 4: mod_base = OTHER; note = misc_feature - bicyclic nucleic acid scaffold modification
  modified_base 16: mod_base = OTHER; note = misc_feature - bicyclic nucleic acid scaffold modification
  modified_base 20: mod_base = OTHER; note = misc_feature - bicyclic nucleic acid scaffold modification
  source 1..20: mol_type = other RNA
gttgcctccggttctgaagg

SEQ ID NO: 4712 - RNA, 20 nt, synthetic construct
  misc_feature 1..20: note = Antisense oligonucleotide
  modified_base 1: mod_base = OTHER; note = misc_feature - bicyclic nucleic acid scaffold modification
  modified_base 11: mod_base = OTHER; note = misc_feature - bicyclic nucleic acid scaffold modification
  modified_base 16: mod_base = OTHER; note = misc_feature - bicyclic nucleic acid scaffold modification
  modified_base 20: mod_base = OTHER; note = misc_feature - bicyclic nucleic acid scaffold modification
  source 1..20: mol_type = other RNA
gttgcctccggttctgaagg

SEQ ID NO: 4713 - RNA, 20 nt, synthetic construct
  misc_feature 1..20: note = Antisense oligonucleotide
  modified_base 1: mod_base = OTHER; note = misc_feature - bicyclic nucleic acid scaffold modification
  modified_base 6: mod_base = OTHER; note = misc_feature - bicyclic nucleic acid scaffold modification
  modified_base 14: mod_base = OTHER; note = misc_feature - bicyclic nucleic acid scaffold modification
  modified_base 20: mod_base = OTHER; note = misc_feature - bicyclic nucleic acid scaffold modification
  source 1..20: mol_type = other RNA
gttgcctccggttctgaagg

SEQ ID NO: 4714 - RNA, 20 nt, synthetic construct
  misc_feature 1..20: note = Antisense oligonucleotide
  modified_base 1: mod_base = OTHER; note = misc_feature - bicyclic nucleic acid scaffold modification
  modified_base 6: mod_base = OTHER; note = misc_feature - bicyclic nucleic acid scaffold modification
  modified_base 11: mod_base = OTHER; note = misc_feature - bicyclic nucleic acid scaffold modification
  modified_base 16: mod_base = OTHER; note = misc_feature - bicyclic nucleic acid scaffold modification
  modified_base 20: mod_base = OTHER; note = misc_feature - bicyclic nucleic acid scaffold modification
  source 1..20: mol_type = other RNA
gttgcctccggttctgaagg

SEQ ID NO: 4715 - RNA, 20 nt, synthetic construct
  modified_base 2: mod_base = OTHER; note = thymine
  misc_feature 1..20: note = Antisense oligonucleotide
  modified_base 1..2: mod_base = OTHER; note = misc_feature - bicyclic nucleic acid scaffold modification
  modified_base 19..20: mod_base = OTHER; note = misc_feature - bicyclic nucleic acid scaffold modification
  source 1..20: mol_type = other RNA
gttgcctccggttctgaagg

SEQ ID NO: 4716 - RNA, 20 nt, synthetic construct
  modified_base 2: mod_base = OTHER; note = thymine
  misc_feature 1..20: note = Antisense oligonucleotide
  modified_base 1..2: mod_base = OTHER; note = misc_feature - bicyclic nucleic acid scaffold modification
  modified_base 11: mod_base = OTHER; note = misc_feature - bicyclic nucleic acid scaffold modification
  modified_base 19..20: mod_base = OTHER; note = misc_feature - bicyclic nucleic acid scaffold modification
  source 1..20: mol_type = other RNA
gttgcctccggttctgaagg

SEQ ID NO: 4717 - RNA, 20 nt, synthetic construct
  modified_base 2: mod_base = OTHER; note = thymine
  misc_feature 1..20: note = Antisense oligonucleotide
  modified_base 1..2: mod_base = OTHER; note = misc_feature - bicyclic nucleic acid scaffold modification
  modified_base 14: mod_base = OTHER; note = misc_feature - bicyclic nucleic acid scaffold modification
  modified_base 19..20: mod_base = OTHER; note = misc_feature - bicyclic nucleic acid scaffold modification
  source 1..20: mol_type = other RNA
gttgcctccggttctgaagg

SEQ ID NO: 4718 - RNA, 20 nt, synthetic construct
  modified_base 2: mod_base = OTHER; note = thymine
  misc_feature 1..20: note = Antisense oligonucleotide
  modified_base 1..2: mod_base = OTHER; note = misc_feature - bicyclic nucleic acid scaffold modification
  modified_base 6: mod_base = OTHER; note = misc_feature - bicyclic nucleic acid scaffold modification
  modified_base 16: mod_base = OTHER; note = misc_feature - bicyclic nucleic acid scaffold modification
  modified_base 19..20: mod_base = OTHER; note = misc_feature - bicyclic nucleic acid scaffold modification
  source 1..20: mol_type = other RNA
gttgcctccggttctgaagg

SEQ ID NO: 4719 - RNA, 20 nt, synthetic construct
  modified_base 1: mod_base = OTHER; note = thymine
  modified_base 20: mod_base = OTHER; note = thymine
  misc_feature 1..20: note = Antisense oligonucleotide
  modified_base 1: mod_base = OTHER; note = misc_feature - bicyclic nucleic acid scaffold modification
  modified_base 20: mod_base = OTHER; note = misc_feature - bicyclic nucleic acid scaffold modification
  source 1..20: mol_type = other RNA
ttgcctccggttctgaaggt

SEQ ID NO: 4720 - RNA, 20 nt, synthetic construct
  modified_base 1: mod_base = OTHER; note = thymine
  modified_base 20: mod_base = OTHER; note = thymine
  misc_feature 1..20: note = Antisense oligonucleotide
  modified_base 1: mod_base = OTHER; note = misc_feature - bicyclic nucleic acid scaffold modification
  modified_base 3: mod_base = OTHER; note = misc_feature - bicyclic nucleic acid scaffold modification
  modified_base 20: mod_base = OTHER; note = misc_feature - bicyclic nucleic acid scaffold modification
  source 1..20: mol_type = other RNA
ttgcctccggttctgaaggt

SEQ ID NO: 4721 - RNA, 20 nt, synthetic construct
  modified_base 1: mod_base = OTHER; note = thymine
  modified_base 20: mod_base = OTHER; note = thymine
  misc_feature 1..20: note = Antisense oligonucleotide
  modified_base 1: mod_base = OTHER; note = misc_feature - bicyclic nucleic acid scaffold modification
  modified_base 10: mod_base = OTHER; note = misc_feature - bicyclic nucleic acid scaffold modification
  modified_base 20: mod_base = OTHER; note = misc_feature - bicyclic nucleic acid scaffold modification
  source 1..20: mol_type = other RNA
ttgcctccggttctgaaggt

SEQ ID NO: 4722 - RNA, 20 nt, synthetic construct
  modified_base 1: mod_base = OTHER; note = thymine
  modified_base 20: mod_base = OTHER; note = thymine
  misc_feature 1..20: note = Antisense oligonucleotide
  modified_base 1: mod_base = OTHER; note = misc_feature - bicyclic nucleic acid scaffold modification
  modified_base 15: mod_base = OTHER; note = misc_feature - bicyclic nucleic acid scaffold modification
  modified_base 20: mod_base = OTHER; note = misc_feature - bicyclic nucleic acid scaffold modification
  source 1..20: mol_type = other RNA
ttgcctccggttctgaaggt

SEQ ID NO: 4723 - RNA, 20 nt, synthetic construct
  modified_base 1: mod_base = OTHER; note = thymine
  modified_base 20: mod_base = OTHER; note = thymine
  misc_feature 1..20: note = Antisense oligonucleotide
  modified_base 1: mod_base = OTHER; note = misc_feature - bicyclic nucleic acid scaffold modification
  modified_base 3: mod_base = OTHER; note = misc_feature - bicyclic nucleic acid scaffold modification
  modified_base 15: mod_base = OTHER; note = misc_feature - bicyclic nucleic acid scaffold modification
  modified_base 20: mod_base = OTHER; note = misc_feature - bicyclic nucleic acid scaffold modification
  source 1..20: mol_type = other RNA
ttgcctccggttctgaaggt

SEQ ID NO: 4724 - RNA, 20 nt, synthetic construct
  modified_base 1: mod_base = OTHER; note = thymine
  modified_base 20: mod_base = OTHER; note = thymine
  misc_feature 1..20: note = Antisense oligonucleotide
  modified_base 1: mod_base = OTHER; note = misc_feature - bicyclic nucleic acid scaffold modification
  modified_base 5: mod_base = OTHER; note = misc_feature - bicyclic nucleic acid scaffold modification
  modified_base 13: mod_base = OTHER; note = misc_feature - bicyclic nucleic acid scaffold modification
  modified_base 20: mod_base = OTHER; note = misc_feature - bicyclic nucleic acid scaffold modification
  source 1..20: mol_type = other RNA
ttgcctccggttctgaaggt

SEQ ID NO: 4725 - RNA, 20 nt, synthetic construct
  modified_base 1: mod_base = OTHER; note = thymine
  modified_base 20: mod_base = OTHER; note = thymine
  misc_feature 1..20: note = Antisense oligonucleotide
  modified_base 1: mod_base = OTHER; note = misc_feature - bicyclic nucleic acid scaffold modification
  modified_base 13: mod_base = OTHER; note = misc_feature - bicyclic nucleic acid scaffold modification
  modified_base 20: mod_base = OTHER; note = misc_feature - bicyclic nucleic acid scaffold modification
  source 1..20: mol_type = other RNA
ttgcctccggttctgaaggt

SEQ ID NO: 4726 - RNA, 20 nt, synthetic construct
  modified_base 1: mod_base = OTHER; note = thymine
  modified_base 20: mod_base = OTHER; note = thymine
  misc_feature 1..20: note = Antisense oligonucleotide
  modified_base 1: mod_base = OTHER; note = misc_feature - bicyclic nucleic acid scaffold modification
  modified_base 5: mod_base = OTHER; note = misc_feature - bicyclic nucleic acid scaffold modification
  modified_base 20: mod_base = OTHER; note = misc_feature - bicyclic nucleic acid scaffold modification
  source 1..20: mol_type = other RNA
ttgcctccggttctgaaggt

SEQ ID NO: 4727 - RNA, 20 nt, synthetic construct
  modified_base 1: mod_base = OTHER; note = thymine
  modified_base 20: mod_base = OTHER; note = thymine
  misc_feature 1..20: note = Antisense oligonucleotide
  modified_base 1: mod_base = OTHER; note = misc_feature - bicyclic nucleic acid scaffold modification
  modified_base 5: mod_base = OTHER; note = misc_feature - bicyclic nucleic acid scaffold modification
  modified_base 15: mod_base = OTHER; note = misc_feature - bicyclic nucleic acid scaffold modification
  modified_base 20: mod_base = OTHER; note = misc_feature - bicyclic nucleic acid scaffold modification
  source 1..20: mol_type = other RNA
ttgcctccggttctgaaggt

SEQ ID NO: 4728 - RNA, 20 nt, synthetic construct
  modified_base 1: mod_base = OTHER; note = thymine
  modified_base 20: mod_base = OTHER; note = thymine
  misc_feature 1..20: note = Antisense oligonucleotide
  modified_base 1: mod_base = OTHER; note = misc_feature - bicyclic nucleic acid scaffold modification
  modified_base 15: mod_base = OTHER; note = misc_feature - bicyclic nucleic acid scaffold modification
  modified_base 19..20: mod_base = OTHER; note = misc_feature - bicyclic nucleic acid scaffold modification
  source 1..20: mol_type = other RNA
ttgcctccggttctgaaggt

SEQ ID NO: 4729 - RNA, 20 nt, synthetic construct
  modified_base 1..2: mod_base = OTHER; note = thymine
  modified_base 20: mod_base = OTHER; note = thymine
  misc_feature 1..20: note = Antisense oligonucleotide
  modified_base 1..2: mod_base = OTHER; note = misc_feature - bicyclic nucleic acid scaffold modification
  modified_base 13: mod_base = OTHER; note = misc_feature - bicyclic nucleic acid scaffold modification
  modified_base 20: mod_base = OTHER; note = misc_feature - bicyclic nucleic acid scaffold modification
  source 1..20: mol_type = other RNA
ttgcctccggttctgaaggt

SEQ ID NO: 4730 - RNA, 20 nt, synthetic construct
  modified_base 1..2: mod_base = OTHER; note = thymine
  modified_base 20: mod_base = OTHER; note = thymine
  misc_feature 1..20: note = Antisense oligonucleotide
  modified_base 1..2: mod_base = OTHER; note = misc_feature - bicyclic nucleic acid scaffold modification
  modified_base 19..20: mod_base = OTHER; note = misc_feature - bicyclic nucleic acid scaffold modification
  source 1..20: mol_type = other RNA
ttgcctccggttctgaaggt

SEQ ID NO: 4731 - RNA, 20 nt, synthetic construct
  modified_base 1..2: mod_base = OTHER; note = thymine
  modified_base 20: mod_base = OTHER; note = thymine
  misc_feature 1..20: note = Antisense oligonucleotide
  modified_base 1..2: mod_base = OTHER; note = misc_feature - bicyclic nucleic acid scaffold modification
  modified_base 15: mod_base = OTHER; note = misc_feature - bicyclic nucleic acid scaffold modification
  modified_base 19..20: mod_base = OTHER; note = misc_feature - bicyclic nucleic acid scaffold modification
  source 1..20: mol_type = other RNA
ttgcctccggttctgaaggt

SEQ ID NO: 4732 - RNA, 20 nt, synthetic construct
  modified_base 1: mod_base = OTHER; note = thymine
  misc_feature 1..20: note = Antisense oligonucleotide
  modified_base 1: mod_base = OTHER; note = misc_feature - bicyclic nucleic acid scaffold modification
  modified_base 20: mod_base = OTHER; note = misc_feature - bicyclic nucleic acid scaffold modification
  source 1..20: mol_type = other RNA
tgcctccggttctgaaggtg

SEQ ID NO: 4733 - RNA, 20 nt, synthetic construct
  modified_base 1: mod_base = OTHER; note = thymine
  misc_feature 1..20: note = Antisense oligonucleotide
  modified_base 1: mod_base = OTHER; note = misc_feature - bicyclic nucleic acid scaffold modification
  modified_base 9: mod_base = OTHER; note = misc_feature - bicyclic nucleic acid scaffold modification
  modified_base 20: mod_base = OTHER; note = misc_feature - bicyclic nucleic acid scaffold modification
  source 1..20: mol_type = other RNA
tgcctccggttctgaaggtg

SEQ ID NO: 4734 - RNA, 20 nt, synthetic construct
  modified_base 1: mod_base = OTHER; note = thymine
  misc_feature 1..20: note = Antisense oligonucleotide
  modified_base 1: mod_base = OTHER; note = misc_feature - bicyclic nucleic acid scaffold modification
  modified_base 14: mod_base = OTHER; note = misc_feature - bicyclic nucleic acid scaffold modification
  modified_base 20: mod_base = OTHER; note = misc_feature - bicyclic nucleic acid scaffold modification
  source 1..20: mol_type = other RNA
tgcctccggttctgaaggtg

SEQ ID NO: 4735 - RNA, 20 nt, synthetic construct
  modified_base 1: mod_base = OTHER; note = thymine
  misc_feature 1..20: note = Antisense oligonucleotide
  modified_base 1: mod_base = OTHER; note = misc_feature - bicyclic nucleic acid scaffold modification
  modified_base 18: mod_base = OTHER; note = misc_feature - bicyclic nucleic acid scaffold modification
  modified_base 20: mod_base = OTHER; note = misc_feature - bicyclic nucleic acid scaffold modification
  source 1..20: mol_type = other RNA
tgcctccggttctgaaggtg

SEQ ID NO: 4736 - RNA, 20 nt, synthetic construct
  modified_base 1: mod_base = OTHER; note = thymine
  misc_feature 1..20: note = Antisense oligonucleotide
  modified_base 1: mod_base = OTHER; note = misc_feature - bicyclic nucleic acid scaffold modification
  modified_base 14: mod_base = OTHER; note = misc_feature - bicyclic nucleic acid scaffold modification
  modified_base 18: mod_base = OTHER; note = misc_feature - bicyclic nucleic acid scaffold modification
  modified_base 20: mod_base = OTHER; note = misc_feature - bicyclic nucleic acid scaffold modification
  source 1..20: mol_type = other RNA
tgcctccggttctgaaggtg

SEQ ID NO: 4737 - RNA, 20 nt, synthetic construct
  modified_base 1: mod_base = OTHER; note = thymine
  misc_feature 1..20: note = Antisense oligonucleotide
  modified_base 1: mod_base = OTHER; note = misc_feature - bicyclic nucleic acid scaffold modification
  modified_base 9: mod_base = OTHER; note = misc_feature - bicyclic nucleic acid scaffold modification
  modified_base 14: mod_base = OTHER; note = misc_feature - bicyclic nucleic acid scaffold modification
  modified_base 20: mod_base = OTHER; note = misc_feature - bicyclic nucleic acid scaffold modification
  source 1..20: mol_type = other RNA
tgcctccggttctgaaggtg

SEQ ID NO: 4738 - RNA, 20 nt, synthetic construct
  modified_base 1: mod_base = OTHER; note = thymine
  misc_feature 1..20: note = Antisense oligonucleotide
  modified_base 1: mod_base = OTHER; note = misc_feature - bicyclic nucleic acid scaffold modification
  modified_base 4: mod_base = OTHER; note = misc_feature - bicyclic nucleic acid scaffold modification
  modified_base 20: mod_base = OTHER; note = misc_feature - bicyclic nucleic acid scaffold modification
  source 1..20: mol_type = other RNA
tgcctccggttctgaaggtg

SEQ ID NO: 4739 - RNA, 20 nt, synthetic construct
  modified_base 1: mod_base = OTHER; note = thymine
  misc_feature 1..20: note = Antisense oligonucleotide
  modified_base 1: mod_base = OTHER; note = misc_feature - bicyclic nucleic acid scaffold modification
  modified_base 12: mod_base = OTHER; note = misc_feature - bicyclic nucleic acid scaffold modification
  modified_base 20: mod_base = OTHER; note = misc_feature - bicyclic nucleic acid scaffold modification
  source 1..20: mol_type = other RNA
tgcctccggttctgaaggtg

SEQ ID NO: 4740 - RNA, 20 nt, synthetic construct
  modified_base 1: mod_base = OTHER; note = thymine
  misc_feature 1..20: note = Antisense oligonucleotide
  modified_base 1: mod_base = OTHER; note = misc_feature - bicyclic nucleic acid scaffold modification
  modified_base 4: mod_base = OTHER; note = misc_feature - bicyclic nucleic acid scaffold modification
  modified_base 12: mod_base = OTHER; note = misc_feature - bicyclic nucleic acid scaffold modification
  modified_base 20: mod_base = OTHER; note = misc_feature - bicyclic nucleic acid scaffold modification
  source 1..20: mol_type = other RNA
tgcctccggttctgaaggtg

SEQ ID NO: 4741 - RNA, 20 nt, synthetic construct
  modified_base 1: mod_base = OTHER; note = thymine
  misc_feature 1..20: note = Antisense oligonucleotide
  modified_base 1: mod_base = OTHER; note = misc_feature - bicyclic nucleic acid scaffold modification
  modified_base 6: mod_base = OTHER; note = misc_feature - bicyclic nucleic acid scaffold modification
  modified_base 14: mod_base = OTHER; note = misc_feature - bicyclic nucleic acid scaffold modification
  modified_base 20: mod_base = OTHER; note = misc_feature - bicyclic nucleic acid scaffold modification
  source 1..20: mol_type = other RNA
tgcctccggttctgaaggtg

SEQ ID NO: 4742 - RNA, 20 nt, synthetic construct
  modified_base 1: mod_base = OTHER; note = thymine
  modified_base 19: mod_base = OTHER; note = thymine
  misc_feature 1..20: note = Antisense oligonucleotide
  modified_base 1..2: mod_base = OTHER; note = misc_feature - bicyclic nucleic acid scaffold modification
  modified_base 19..20: mod_base = OTHER; note = misc_feature - bicyclic nucleic acid scaffold modification
  source 1..20: mol_type = other RNA
tgcctccggttctgaaggtg

SEQ ID NO: 4743 - RNA, 20 nt, synthetic construct
  modified_base 1: mod_base = OTHER; note = thymine
  modified_base 19: mod_base = OTHER; note = thymine
  misc_feature 1..20: note = Antisense oligonucleotide
  modified_base 1..2: mod_base = OTHER; note = misc_feature - bicyclic nucleic acid scaffold modification
  modified_base 12: mod_base = OTHER; note = misc_feature - bicyclic nucleic acid scaffold modification
  modified_base 19..20: mod_base = OTHER; note = misc_feature - bicyclic nucleic acid scaffold modification
  source 1..20: mol_type = other RNA
tgcctccggttctgaaggtg

SEQ ID NO: 4744 - RNA, 20 nt, synthetic construct
  modified_base 1: mod_base = OTHER; note = thymine
  modified_base 19: mod_base = OTHER; note = thymine
  misc_feature 1..20: note = Antisense oligonucleotide
  modified_base 1..2: mod_base = OTHER; note = misc_feature - bicyclic nucleic acid scaffold modification
  modified_base 14: mod_base = OTHER; note = misc_feature - bicyclic nucleic acid scaffold modification
  modified_base 19..20: mod_base = OTHER; note = misc_feature - bicyclic nucleic acid scaffold modification
  source 1..20: mol_type = other RNA
tgcctccggttctgaaggtg

SEQ ID NO: 4745 - RNA, 20 nt, synthetic construct
  modified_base 1: mod_base = OTHER; note = thymine
  modified_base 19: mod_base = OTHER; note = thymine
  misc_feature 1..20: note = Antisense oligonucleotide
  modified_base 1..2: mod_base = OTHER; note = misc_feature - bicyclic nucleic acid scaffold modification
  modified_base 9: mod_base = OTHER; note = misc_feature - bicyclic nucleic acid scaffold modification
  modified_base 14: mod_base = OTHER; note = misc_feature - bicyclic nucleic acid scaffold modification
  modified_base 19..20: mod_base = OTHER; note = misc_feature - bicyclic nucleic acid scaffold modification
  source 1..20: mol_type = other RNA
tgcctccggttctgaaggtg

SEQ ID NO: 4746 - RNA, 20 nt, synthetic construct
  modified_base 20: mod_base = OTHER; note = thymine
  misc_feature 1..20: note = Antisense oligonucleotide
  modified_base 1: mod_base = OTHER; note = misc_feature - bicyclic nucleic acid scaffold modification
  modified_base 20: mod_base = OTHER; note = misc_feature - bicyclic nucleic acid scaffold modification
  source 1..20: mol_type = other RNA
gcctccggttctgaaggtgt

SEQ ID NO: 4747 - RNA, 20 nt, synthetic construct
  modified_base 20: mod_base = OTHER; note = thymine
  misc_feature 1..20: note = Antisense oligonucleotide
  modified_base 1: mod_base = OTHER; note = misc_feature - bicyclic nucleic acid scaffold modification
  modified_base 5: mod_base = OTHER; note = misc_feature - bicyclic nucleic acid scaffold modification
  modified_base 20: mod_base = OTHER; note = misc_feature - bicyclic nucleic acid scaffold modification
  source 1..20: mol_type = other RNA
gcctccggttctgaaggtgt

SEQ ID NO: 4748 - RNA, 20 nt, synthetic construct
  modified_base 20: mod_base = OTHER; note = thymine
  misc_feature 1..20: note = Antisense oligonucleotide
  modified_base 1: mod_base = OTHER; note = misc_feature - bicyclic nucleic acid scaffold modification
  modified_base 8: mod_base = OTHER; note = misc_feature - bicyclic nucleic acid scaffold modification
  modified_base 20: mod_base = OTHER; note = misc_feature - bicyclic nucleic acid scaffold modification
  source 1..20: mol_type = other RNA
gcctccggttctgaaggtgt

SEQ ID NO: 4749 - RNA, 20 nt, synthetic construct
  modified_base 20: mod_base = OTHER; note = thymine
  misc_feature 1..20: note = Antisense oligonucleotide
  modified_base 1: mod_base = OTHER; note = misc_feature - bicyclic nucleic acid scaffold modification
  modified_base 11: mod_base = OTHER; note = misc_feature - bicyclic nucleic acid scaffold modification
  modified_base 20: mod_base = OTHER; note = misc_feature - bicyclic nucleic acid scaffold modification
  source 1..20: mol_type = other RNA
gcctccggttctgaaggtgt

SEQ ID NO: 4750 - RNA, 20 nt, synthetic construct
  modified_base 20: mod_base = OTHER; note = thymine
  misc_feature 1..20: note = Antisense oligonucleotide
  modified_base 1: mod_base = OTHER; note = misc_feature - bicyclic nucleic acid scaffold modification
  modified_base 13: mod_base = OTHER; note = misc_feature - bicyclic nucleic acid scaffold modification
  modified_base 20: mod_base = OTHER; note = misc_feature - bicyclic nucleic acid scaffold modification
  source 1..20: mol_type = other RNA
gcctccggttctgaaggtgt

SEQ ID NO: 4751 - RNA, 20 nt, synthetic construct
  modified_base 20: mod_base = OTHER; note = thymine
  misc_feature 1..20: note = Antisense oligonucleotide
  modified_base 1: mod_base = OTHER; note = misc_feature - bicyclic nucleic acid scaffold modification
  modified_base 17: mod_base = OTHER; note = misc_feature - bicyclic nucleic acid scaffold modification
  modified_base 20: mod_base = OTHER; note = misc_feature - bicyclic nucleic acid scaffold modification
  source 1..20: mol_type = other RNA
gcctccggttctgaaggtgt

SEQ ID NO: 4752 - RNA, 20 nt, synthetic construct
  modified_base 20: mod_base = OTHER; note = thymine
  misc_feature 1..20: note = Antisense oligonucleotide
  modified_base 1: mod_base = OTHER; note = misc_feature - bicyclic nucleic acid scaffold modification
  modified_base 8: mod_base = OTHER; note = misc_feature - bicyclic nucleic acid scaffold modification
  modified_base 16: mod_base = OTHER; note = misc_feature - bicyclic nucleic acid scaffold modification
  modified_base 20: mod_base = OTHER; note = misc_feature - bicyclic nucleic acid scaffold modification
  source 1..20: mol_type = other RNA
gcctccggttctgaaggtgt

SEQ ID NO: 4753 - RNA, 20 nt, synthetic construct
  modified_base 20: mod_base = OTHER; note = thymine
  misc_feature 1..20: note = Antisense oligonucleotide
  modified_base 1: mod_base = OTHER; note = misc_feature - bicyclic nucleic acid scaffold modification
  modified_base 3: mod_base = OTHER; note = misc_feature - bicyclic nucleic acid scaffold modification
  modified_base 13: mod_base = OTHER; note = misc_feature - bicyclic nucleic acid scaffold modification
  modified_base 20: mod_base = OTHER; note = misc_feature - bicyclic nucleic acid scaffold modification
  source 1..20: mol_type = other RNA
gcctccggttctgaaggtgt

SEQ ID NO: 4754 - RNA, 20 nt, synthetic construct
  modified_base 20: mod_base = OTHER; note = thymine
  misc_feature 1..20: note = Antisense oligonucleotide
  modified_base 1: mod_base = OTHER; note = misc_feature - bicyclic nucleic acid scaffold modification
  modified_base 11: mod_base = OTHER; note = misc_feature - bicyclic nucleic acid scaffold modification
  modified_base 16: mod_base = OTHER; note = misc_feature - bicyclic nucleic acid scaffold modification
  modified_base 20: mod_base = OTHER; note = misc_feature - bicyclic nucleic acid scaffold modification
  source 1..20: mol_type = other RNA
gcctccggttctgaaggtgt

SEQ ID NO: 4755 - RNA, 20 nt, synthetic construct
  modified_base 20: mod_base = OTHER; note = thymine
  misc_feature 1..20: note = Antisense oligonucleotide
  modified_base 1: mod_base = OTHER; note = misc_feature - bicyclic nucleic acid scaffold modification
  modified_base 8: mod_base = OTHER; note = misc_feature - bicyclic nucleic acid scaffold modification
  modified_base 13: mod_base = OTHER; note = misc_feature - bicyclic nucleic acid scaffold modification
  modified_base 17: mod_base = OTHER; note = misc_feature - bicyclic nucleic acid scaffold modification
  modified_base 20: mod_base = OTHER; note = misc_feature - bicyclic nucleic acid scaffold modification
  source 1..20: mol_type = other RNA
gcctccggttctgaaggtgt

SEQ ID NO: 4756 - RNA, 20 nt, synthetic construct
  modified_base 20: mod_base = OTHER; note = thymine
  misc_feature 1..20: note = Antisense oligonucleotide
  modified_base 1..2: mod_base = OTHER; note = misc_feature - bicyclic nucleic acid scaffold modification
  modified_base 19..20: mod_base = OTHER; note = misc_feature - bicyclic nucleic acid scaffold modification
  source 1..20: mol_type = other RNA
gcctccggttctgaaggtgt

SEQ ID NO: 4757 - RNA, 20 nt, synthetic construct
  modified_base 20: mod_base = OTHER; note = thymine
  misc_feature 1..20: note = Antisense oligonucleotide
  modified_base 1..2: mod_base = OTHER; note = misc_feature - bicyclic nucleic acid scaffold modification
  modified_base 13: mod_base = OTHER; note = misc_feature - bicyclic nucleic acid scaffold modification
  modified_base 19..20: mod_base = OTHER; note = misc_feature - bicyclic nucleic acid scaffold modification
  source 1..20: mol_type = other RNA
gcctccggttctgaaggtgt

SEQ ID NO: 4758 - RNA, 20 nt, synthetic construct
  modified_base 20: mod_base = OTHER; note = thymine
  misc_feature 1..20: note = Antisense oligonucleotide
  modified_base 1..2: mod_base = OTHER; note = misc_feature - bicyclic nucleic acid scaffold modification
  modified_base 8: mod_base = OTHER; note = misc_feature - bicyclic nucleic acid scaffold modification
  modified_base 13: mod_base = OTHER; note = misc_feature - bicyclic nucleic acid scaffold modification
  modified_base 19..20: mod_base = OTHER; note = misc_feature - bicyclic nucleic acid scaffold modification
  source 1..20: mol_type = other RNA
gcctccggttctgaaggtgt

SEQ ID NO: 4759 - RNA, 20 nt, synthetic construct
  modified_base 20: mod_base = OTHER; note = thymine
  misc_feature 1..20: note = Antisense oligonucleotide
  modified_base 1: mod_base = OTHER; note = misc_feature - bicyclic nucleic acid scaffold modification
  modified_base 20: mod_base = OTHER; note = misc_feature - bicyclic nucleic acid scaffold modification
  source 1..20: mol_type = other RNA
cctccggttctgaaggtgtt

SEQ ID NO: 4760 - RNA, 20 nt, synthetic construct
  modified_base 20: mod_base = OTHER; note = thymine
  misc_feature 1..20: note = Antisense oligonucleotide
  modified_base 1: mod_base = OTHER; note = misc_feature - bicyclic nucleic acid scaffold modification
  modified_base 7: mod_base = OTHER; note = misc_feature - bicyclic nucleic acid scaffold modification
  modified_base 20: mod_base = OTHER; note = misc_feature - bicyclic nucleic acid scaffold modification
  source 1..20: mol_type = other RNA
cctccggttctgaaggtgtt

SEQ ID NO: 4761 - RNA, 20 nt, synthetic construct
  modified_base 20: mod_base = OTHER; note = thymine
  misc_feature 1..20: note = Antisense oligonucleotide
  modified_base 1: mod_base = OTHER; note = misc_feature - bicyclic nucleic acid scaffold modification
  modified_base 10: mod_base = OTHER; note = misc_feature - bicyclic nucleic acid scaffold modification
  modified_base 20: mod_base = OTHER; note = misc_feature - bicyclic nucleic acid scaffold modification
  source 1..20: mol_type = other RNA
cctccggttctgaaggtgtt

SEQ ID NO: 4762 - RNA, 20 nt, synthetic construct
  modified_base 20: mod_base = OTHER; note = thymine
  misc_feature 1..20: note = Antisense oligonucleotide
  modified_base 1: mod_base = OTHER; note = misc_feature - bicyclic nucleic acid scaffold modification
  modified_base 12: mod_base = OTHER; note = misc_feature - bicyclic nucleic acid scaffold modification
  modified_base 20: mod_base = OTHER; note = misc_feature - bicyclic nucleic acid scaffold modification
  source 1..20: mol_type = other RNA
cctccggttctgaaggtgtt

SEQ ID NO: 4763 - RNA, 20 nt, synthetic construct
  modified_base 20: mod_base = OTHER; note = thymine
  misc_feature 1..20: note = Antisense oligonucleotide
  modified_base 1: mod_base = OTHER; note = misc_feature - bicyclic nucleic acid scaffold modification
  modified_base 15: mod_base = OTHER; note = misc_feature - bicyclic nucleic acid scaffold modification
  modified_base 20: mod_base = OTHER; note = misc_feature - bicyclic nucleic acid scaffold modification
  source 1..20: mol_type = other RNA
cctccggttctgaaggtgtt

SEQ ID NO: 4764 - RNA, 20 nt, synthetic construct
  modified_base 20: mod_base = OTHER; note = thymine
  misc_feature 1..20: note = Antisense oligonucleotide
  modified_base 1: mod_base = OTHER; note = misc_feature - bicyclic nucleic acid scaffold modification
  modified_base 18: mod_base = OTHER; note = misc_feature - bicyclic nucleic acid scaffold modification
  modified_base 20: mod_base = OTHER; note = misc_feature - bicyclic nucleic acid scaffold modification
  source 1..20: mol_type = other RNA
cctccggttctgaaggtgtt

SEQ ID NO: 4765 - RNA, 20 nt, synthetic construct
  modified_base 20: mod_base = OTHER; note = thymine
  misc_feature 1..20: note = Antisense oligonucleotide
  modified_base 1: mod_base = OTHER; note = misc_feature - bicyclic nucleic acid scaffold modification
  modified_base 10: mod_base = OTHER; note = misc_feature - bicyclic nucleic acid scaffold modification
  modified_base 18: mod_base = OTHER; note = misc_feature - bicyclic nucleic acid scaffold modification
  modified_base 20: mod_base = OTHER; note = misc_feature - bicyclic nucleic acid scaffold modification
  source 1..20: mol_type = other RNA
cctccggttctgaaggtgtt

SEQ ID NO: 4766 - RNA, 20 nt, synthetic construct
  modified_base 20: mod_base = OTHER; note = thymine
  misc_feature 1..20: note = Antisense oligonucleotide
  modified_base 1: mod_base = OTHER; note = misc_feature - bicyclic nucleic acid scaffold modification
  modified_base 12: mod_base = OTHER; note = misc_feature - bicyclic nucleic acid scaffold modification
  modified_base 18: mod_base = OTHER; note = misc_feature - bicyclic nucleic acid scaffold modification
  modified_base 20: mod_base = OTHER; note = misc_feature - bicyclic nucleic acid scaffold modification
  source 1..20: mol_type = other RNA
cctccggttctgaaggtgtt

SEQ ID NO: 4767 - RNA, 20 nt, synthetic construct
  modified_base 20: mod_base = OTHER; note = thymine
  misc_feature 1..20: note = Antisense oligonucleotide
  modified_base 1: mod_base = OTHER; note = misc_feature - bicyclic nucleic acid scaffold modification
  modified_base 7: mod_base = OTHER; note = misc_feature - bicyclic nucleic acid scaffold modification
  modified_base 12: mod_base = OTHER; note = misc_feature - bicyclic nucleic acid scaffold modification
  modified_base 16: mod_base = OTHER; note = misc_feature - bicyclic nucleic acid scaffold modification
  modified_base 20: mod_base = OTHER; note = misc_feature - bicyclic nucleic acid scaffold modification
  source 1..20: mol_type = other RNA
cctccggttctgaaggtgtt

SEQ ID NO: 4768 - RNA, 20 nt, synthetic construct
  modified_base 20: mod_base = OTHER; note = thymine
  misc_feature 1..20: note = Antisense oligonucleotide
  modified_base 1: mod_base = OTHER; note = misc_feature - bicyclic nucleic acid scaffold modification
  modified_base 4: mod_base = OTHER; note = misc_feature - bicyclic nucleic acid scaffold modification
  modified_base 10: mod_base = OTHER; note = misc_feature - bicyclic nucleic acid scaffold modification
  modified_base 20: mod_base = OTHER; note = misc_feature - bicyclic nucleic acid scaffold modification
  source 1..20: mol_type = other RNA
cctccggttctgaaggtgtt

SEQ ID NO: 4769 - RNA, 20 nt, synthetic construct
  modified_base 19..20: mod_base = OTHER; note = thymine
  misc_feature 1..20: note = Antisense oligonucleotide
  modified_base 1..2: mod_base = OTHER; note = misc_feature - bicyclic nucleic acid scaffold modification
  modified_base 19..20: mod_base = OTHER; note = misc_feature - bicyclic nucleic acid scaffold modification
  source 1..20: mol_type = other RNA
cctccggttctgaaggtgtt

SEQ ID NO: 4770 - RNA, 20 nt, synthetic construct
  modified_base 19..20: mod_base = OTHER; note = thymine
  misc_feature 1..20: note = Antisense oligonucleotide
  modified_base 1..2: mod_base = OTHER; note = misc_feature - bicyclic nucleic acid scaffold modification
  modified_base 12: mod_base = OTHER; note = misc_feature - bicyclic nucleic acid scaffold modification
  modified_base 19..20: mod_base = OTHER; note = misc_feature - bicyclic nucleic acid scaffold modification
  source 1..20: mol_type = other RNA
cctccggttctgaaggtgtt

SEQ ID NO: 4771 - RNA, 20 nt, synthetic construct
  modified_base 19..20: mod_base = OTHER; note = thymine
  misc_feature 1..20: note = Antisense oligonucleotide
  modified_base 1..2: mod_base = OTHER; note = misc_feature - bicyclic nucleic acid scaffold modification
  modified_base 10: mod_base = OTHER; note = misc_feature - bicyclic nucleic acid scaffold modification
  modified_base 12: mod_base = OTHER; note = misc_feature - bicyclic nucleic acid scaffold modification
  modified_base 19..20: mod_base = OTHER; note = misc_feature - bicyclic nucleic acid scaffold modification
  source 1..20: mol_type = other RNA
cctccggttctgaaggtgtt

SEQ ID NO: 4772 - RNA, 20 nt, synthetic construct
  misc_feature 1..20: note = Antisense oligonucleotide
  modified_base 1: mod_base = OTHER; note = misc_feature - bicyclic nucleic acid scaffold modification
  modified_base 20: mod_base = OTHER; note = misc_feature - bicyclic nucleic acid scaffold modification
  source 1..20: mol_type = other RNA
ctccggttctgaaggtgttc

SEQ ID NO: 4773 - RNA, 20 nt, synthetic construct
  misc_feature 1..20: note = Antisense oligonucleotide
  modified_base 1: mod_base = OTHER; note = misc_feature - bicyclic nucleic acid scaffold modification
  modified_base 6: mod_base = OTHER; note = misc_feature - bicyclic nucleic acid scaffold modification
  modified_base 20: mod_base = OTHER; note = misc_feature - bicyclic nucleic acid scaffold modification
  source 1..20: mol_type = other RNA
ctccggttctgaaggtgttc

SEQ ID NO: 4774 - RNA, 20 nt, synthetic construct
  misc_feature 1..20: note = Antisense oligonucleotide
  modified_base 1: mod_base = OTHER; note = misc_feature - bicyclic nucleic acid scaffold modification
  modified_base 9: mod_base = OTHER; note = misc_feature - bicyclic nucleic acid scaffold modification
  modified_base 20: mod_base = OTHER; note = misc_feature - bicyclic nucleic acid scaffold modification
  source 1..20: mol_type = other RNA
ctccggttctgaaggtgttc

SEQ ID NO: 4775 - RNA, 20 nt, synthetic construct
  misc_feature 1..20: note = Antisense oligonucleotide
  modified_base 1: mod_base = OTHER; note = misc_feature - bicyclic nucleic acid scaffold modification
  modified_base 11: mod_base = OTHER; note = misc_feature - bicyclic nucleic acid scaffold modification
  modified_base 20: mod_base = OTHER; note = misc_feature - bicyclic nucleic acid scaffold modification
  source 1..20: mol_type = other RNA
ctccggttctgaaggtgttc

SEQ ID NO: 4776 - RNA, 20 nt, synthetic construct
  misc_feature 1..20: note = Antisense oligonucleotide
  modified_base 1: mod_base = OTHER; note = misc_feature - bicyclic nucleic acid scaffold modification
  modified_base 15: mod_base = OTHER; note = misc_feature - bicyclic nucleic acid scaffold modification
  modified_base 20: mod_base = OTHER; note = misc_feature - bicyclic nucleic acid scaffold modification
  source 1..20: mol_type = other RNA
ctccggttctgaaggtgttc

SEQ ID NO: 4777 - RNA, 20 nt, synthetic construct
  misc_feature 1..20: note = Antisense oligonucleotide
  modified_base 1: mod_base = OTHER; note = misc_feature - bicyclic nucleic acid scaffold modification
  modified_base 17: mod_base = OTHER; note = misc_feature - bicyclic nucleic acid scaffold modification
  modified_base 20: mod_base = OTHER; note = misc_feature - bicyclic nucleic acid scaffold modification
  source 1..20: mol_type = other RNA
ctccggttctgaaggtgttc

SEQ ID NO: 4778 - RNA, 20 nt, synthetic construct
  misc_feature 1..20: note = Antisense oligonucleotide
  modified_base 1: mod_base = OTHER; note = misc_feature - bicyclic nucleic acid scaffold modification
  modified_base 9: mod_base = OTHER; note = misc_feature - bicyclic nucleic acid scaffold modification
  modified_base 17: mod_base = OTHER; note = misc_feature - bicyclic nucleic acid scaffold modification
  modified_base 20: mod_base = OTHER; note = misc_feature - bicyclic nucleic acid scaffold modification
  source 1..20: mol_type = other RNA
ctccggttctgaaggtgttc

SEQ ID NO: 4779 - RNA, 20 nt, synthetic construct
  misc_feature 1..20: note = Antisense oligonucleotide
  modified_base 1: mod_base = OTHER; note = misc_feature - bicyclic nucleic acid scaffold modification
  modified_base 11: mod_base = OTHER; note = misc_feature - bicyclic nucleic acid scaffold modification
  modified_base 17: mod_base = OTHER; note = misc_feature - bicyclic nucleic acid scaffold modification
  modified_base 20: mod_base = OTHER; note = misc_feature - bicyclic nucleic acid scaffold modification
  source 1..20: mol_type = other RNA
ctccggttctgaaggtgttc

SEQ ID NO: 4780 - RNA, 20 nt, synthetic construct
  misc_feature 1..20: note = Antisense oligonucleotide
  modified_base 1: mod_base = OTHER; note = misc_feature - bicyclic nucleic acid scaffold modification
  modified_base 6: mod_base = OTHER; note = misc_feature - bicyclic nucleic acid scaffold modification
  modified_base 11: mod_base = OTHER; note = misc_feature - bicyclic nucleic acid scaffold modification
  modified_base 20: mod_base = OTHER; note = misc_feature - bicyclic nucleic acid scaffold modification
  source 1..20: mol_type = other RNA
ctccggttctgaaggtgttc

SEQ ID NO: 4781 - RNA, 20 nt, synthetic construct
  misc_feature 1..20: note = Antisense oligonucleotide
  modified_base 1: mod_base = OTHER; note = misc_feature - bicyclic nucleic acid scaffold modification
  modified_base 6: mod_base = OTHER; note = misc_feature - bicyclic nucleic acid scaffold modification
  modified_base 11: mod_base = OTHER; note = misc_feature - bicyclic nucleic acid scaffold modification
  modified_base 17: mod_base = OTHER; note = misc_feature - bicyclic nucleic acid scaffold modification
  modified_base 20: mod_base = OTHER; note = misc_feature - bicyclic nucleic acid scaffold modification
  source 1..20: mol_type = other RNA
ctccggttctgaaggtgttc

SEQ ID NO: 4782 - RNA, 20 nt, synthetic construct
  modified_base 2: mod_base = OTHER; note = thymine
  modified_base 19: mod_base = OTHER; note = thymine
  misc_feature 1..20: note = Antisense oligonucleotide
  modified_base 1..2: mod_base = OTHER; note = misc_feature - bicyclic nucleic acid scaffold modification
  modified_base 19..20: mod_base = OTHER; note = misc_feature - bicyclic nucleic acid scaffold modification
  source 1..20: mol_type = other RNA
ctccggttctgaaggtgttc

SEQ ID NO: 4783 - RNA, 20 nt, synthetic construct
  modified_base 2: mod_base = OTHER; note = thymine
  modified_base 19: mod_base = OTHER; note = thymine
  misc_feature 1..20: note = Antisense oligonucleotide
  modified_base 1..2: mod_base = OTHER; note = misc_feature - bicyclic nucleic acid scaffold modification
  modified_base 9: mod_base = OTHER; note = misc_feature - bicyclic nucleic acid scaffold modification
  modified_base 19..20: mod_base = OTHER; note = misc_feature - bicyclic nucleic acid scaffold modification
  source 1..20: mol_type = other RNA
ctccggttctgaaggtgttc

SEQ ID NO: 4784 - RNA, 20 nt, synthetic construct
  modified_base 2: mod_base = OTHER; note = thymine
  modified_base 19: mod_base = OTHER; note = thymine
  misc_feature 1..20: note = Antisense oligonucleotide
  modified_base 1..2: mod_base = OTHER; note = misc_feature - bicyclic nucleic acid scaffold modification
  modified_base 9: mod_base = OTHER; note = misc_feature - bicyclic nucleic acid scaffold modification
  modified_base 17: mod_base = OTHER; note = misc_feature - bicyclic nucleic acid scaffold modification
  modified_base 19..20: mod_base = OTHER; note = misc_feature - bicyclic nucleic acid scaffold modification
  source 1..20: mol_type = other RNA
ctccggttctgaaggtgttc

SEQ ID NO: 4785 - RNA, 18 nt, synthetic construct
  misc_feature 1..18: note = Antisense oligonucleotide
  modified_base 1: mod_base = OTHER; note = misc_feature - bicyclic nucleic acid scaffold modification
  modified_base 18: mod_base = OTHER; note = misc_feature - bicyclic nucleic acid scaffold modification
  source 1..18: mol_type = other RNA
gttgcctccggttctgaa

SEQ ID NO: 4786 - RNA, 18 nt, synthetic construct
  misc_feature 1..18: note = Antisense oligonucleotide
  modified_base 1: mod_base = OTHER; note = misc_feature - bicyclic nucleic acid scaffold modification
  modified_base 16: mod_base = OTHER; note = misc_feature - bicyclic nucleic acid scaffold modification
  modified_base 18: mod_base = OTHER; note = misc_feature - bicyclic nucleic acid scaffold modification
  source 1..18: mol_type = other RNA
gttgcctccggttctgaa

SEQ ID NO: 4787 - RNA, 18 nt, synthetic construct
  misc_feature 1..18: note = Antisense oligonucleotide
  modified_base 1: mod_base = OTHER; note = misc_feature - bicyclic nucleic acid scaffold modification
  modified_base 14: mod_base = OTHER; note = misc_feature - bicyclic nucleic acid scaffold modification
  modified_base 18: mod_base = OTHER; note = misc_feature - bicyclic nucleic acid scaffold modification
  source 1..18: mol_type = other RNA
gttgcctccggttctgaa

SEQ ID NO: 4788 - RNA, 18 nt, synthetic construct
  misc_feature 1..18: note = Antisense oligonucleotide
  modified_base 1: mod_base = OTHER; note = misc_feature - bicyclic nucleic acid scaffold modification
  modified_base 11: mod_base = OTHER; note = misc_feature - bicyclic nucleic acid scaffold modification
  modified_base 18: mod_base = OTHER; note = misc_feature - bicyclic nucleic acid scaffold modification
  source 1..18: mol_type = other RNA
gttgcctccggttctgaa

SEQ ID NO: 4789 - RNA, 18 nt, synthetic construct
  misc_feature 1..18: note = Antisense oligonucleotide
  modified_base 1: mod_base = OTHER; note = misc_feature - bicyclic nucleic acid scaffold modification
  modified_base 8: mod_base = OTHER; note = misc_feature - bicyclic nucleic acid scaffold modification
  modified_base 18: mod_base = OTHER; note = misc_feature - bicyclic nucleic acid scaffold modification
  source 1..18: mol_type = other RNA
gttgcctccggttctgaa

SEQ ID NO: 4790 - RNA, 18 nt, synthetic construct
  misc_feature 1..18: note = Antisense oligonucleotide
  modified_base 1: mod_base = OTHER; note = misc_feature - bicyclic nucleic acid scaffold modification
  modified_base 4: mod_base = OTHER; note = misc_feature - bicyclic nucleic acid scaffold modification
  modified_base 18: mod_base = OTHER; note = misc_feature - bicyclic nucleic acid scaffold modification
  source 1..18: mol_type = other RNA
gttgcctccggttctgaa

SEQ ID NO: 4791 - RNA, 18 nt, synthetic construct
  misc_feature 1..18: note = Antisense oligonucleotide
  modified_base 1: mod_base = OTHER; note = misc_feature - bicyclic nucleic acid scaffold modification
  modified_base 4: mod_base = OTHER; note = misc_feature - bicyclic nucleic acid scaffold modification
  modified_base 16: mod_base = OTHER; note = misc_feature - bicyclic nucleic acid scaffold modification
  modified_base 18: mod_base = OTHER; note = misc_feature - bicyclic nucleic acid scaffold modification
  source 1..18: mol_type = other RNA
gttgcctccggttctgaa

SEQ ID NO: 4792 - RNA, 18 nt, synthetic construct
  misc_feature 1..18: note = Antisense oligonucleotide
  modified_base 1: mod_base = OTHER; note = misc_feature - bicyclic nucleic acid scaffold modification
  modified_base 6: mod_base = OTHER; note = misc_feature - bicyclic nucleic acid scaffold modification
  modified_base 14: mod_base = OTHER; note = misc_feature - bicyclic nucleic acid scaffold modification
  modified_base 18: mod_base = OTHER; note = misc_feature - bicyclic nucleic acid scaffold modification
  source 1..18: mol_type = other RNA
gttgcctccggttctgaa

SEQ ID NO: 4793 - RNA, 18 nt, synthetic construct
  misc_feature 1..18: note = Antisense oligonucleotide
  modified_base 1: mod_base = OTHER; note = misc_feature - bicyclic nucleic acid scaffold modification
  modified_base 11: mod_base = OTHER; note = misc_feature - bicyclic nucleic acid scaffold modification
  modified_base 16: mod_base = OTHER; note = misc_feature - bicyclic nucleic acid scaffold modification
  modified_base 18: mod_base = OTHER; note = misc_feature - bicyclic nucleic acid scaffold modification
  source 1..18: mol_type = other RNA
gttgcctccggttctgaa

SEQ ID NO: 4794 - RNA, 18 nt, synthetic construct
  modified_base 2: mod_base = OTHER; note = thymine
  misc_feature 1..18: note = Antisense oligonucleotide
  modified_base 1..2: mod_base = OTHER; note = misc_feature - bicyclic nucleic acid scaffold modification
  modified_base 17..18: mod_base = OTHER; note = misc_feature - bicyclic nucleic acid scaffold modification
  source 1..18: mol_type = other RNA
gttgcctccggttctgaa

SEQ ID NO: 4795 - RNA, 18 nt, synthetic construct
  modified_base 2: mod_base = OTHER; note = thymine
  misc_feature 1..18: note = Antisense oligonucleotide
  modified_base 1..2: mod_base = OTHER; note = misc_feature - bicyclic nucleic acid scaffold modification
  modified_base 14: mod_base = OTHER; note = misc_feature - bicyclic nucleic acid scaffold modification
  modified_base 17..18: mod_base = OTHER; note = misc_feature - bicyclic nucleic acid scaffold modification
  source 1..18: mol_type = other RNA
gttgcctccggttctgaa

SEQ ID NO: 4796 - RNA, 18 nt, synthetic construct
  modified_base 1: mod_base = OTHER; note = thymine
  misc_feature 1..18: note = Antisense oligonucleotide
  modified_base 1: mod_base = OTHER; note = misc_feature - bicyclic nucleic acid scaffold modification
  modified_base 18: mod_base = OTHER; note = misc_feature - bicyclic nucleic acid scaffold modification
  source 1..18: mol_type = other RNA
ttgcctccggttctgaag

SEQ ID NO: 4797 - RNA, 18 nt, synthetic construct
  modified_base 1: mod_base = OTHER; note = thymine
  misc_feature 1..18: note = Antisense oligonucleotide
  modified_base 1: mod_base = OTHER; note = misc_feature - bicyclic nucleic acid scaffold modification
  modified_base 5: mod_base = OTHER; note = misc_feature - bicyclic nucleic acid scaffold modification
  modified_base 18: mod_base = OTHER; note = misc_feature - bicyclic nucleic acid scaffold modification
  source 1..18: mol_type = other RNA
ttgcctccggttctgaag

SEQ ID NO: 4798 - RNA, 18 nt, synthetic construct
  modified_base 1: mod_base = OTHER; note = thymine
  misc_feature 1..18: note = Antisense oligonucleotide
  modified_base 1: mod_base = OTHER; note = misc_feature - bicyclic nucleic acid scaffold modification
  modified_base 10: mod_base = OTHER; note = misc_feature - bicyclic nucleic acid scaffold modification
  modified_base 18: mod_base = OTHER; note = misc_feature - bicyclic nucleic acid scaffold modification
  source 1..18: mol_type = other RNA
ttgcctccggttctgaag

SEQ ID NO: 4799 - RNA, 18 nt, synthetic construct
  modified_base 1: mod_base = OTHER; note = thymine
  misc_feature 1..18: note = Antisense oligonucleotide
  modified_base 1: mod_base = OTHER; note = misc_feature - bicyclic nucleic acid scaffold modification
  modified_base 13: mod_base = OTHER; note = misc_feature - bicyclic nucleic acid scaffold modification
  modified_base 18: mod_base = OTHER; note = misc_feature - bicyclic nucleic acid scaffold modification
  source 1..18: mol_type = other RNA
ttgcctccggttctgaag

SEQ ID NO: 4800 - RNA, 18 nt, synthetic construct
  modified_base 1: mod_base = OTHER; note = thymine
  misc_feature 1..18: note = Antisense oligonucleotide
  modified_base 1: mod_base = OTHER; note = misc_feature - bicyclic nucleic acid scaffold modification
  modified_base 15: mod_base = OTHER; note = misc_feature - bicyclic nucleic acid scaffold modification
  modified_base 18: mod_base = OTHER; note = misc_feature - bicyclic nucleic acid scaffold modification
  source 1..18: mol_type = other RNA
ttgcctccggttctgaag

SEQ ID NO: 4801 - RNA, 18 nt, synthetic construct
  modified_base 1: mod_base = OTHER; note = thymine
  misc_feature 1..18: note = Antisense oligonucleotide
  modified_base 1: mod_base = OTHER; note = misc_feature - bicyclic nucleic acid scaffold modification
  modified_base 4: mod_base = OTHER; note = misc_feature - bicyclic nucleic acid scaffold modification
  modified_base 18: mod_base = OTHER; note = misc_feature - bicyclic nucleic acid scaffold modification
  source 1..18: mol_type = other RNA
ttgcctccggttctgaag

SEQ ID NO: 4802 - RNA, 18 nt, synthetic construct
  modified_base 1: mod_base = OTHER; note = thymine
  misc_feature 1..18: note = Antisense oligonucleotide
  modified_base 1: mod_base = OTHER; note = misc_feature - bicyclic nucleic acid scaffold modification
  modified_base 10: mod_base = OTHER; note = misc_feature - bicyclic nucleic acid scaffold modification
  modified_base 15: mod_base = OTHER; note = misc_feature - bicyclic nucleic acid scaffold modification
  modified_base 18: mod_base = OTHER; note = misc_feature - bicyclic nucleic acid scaffold modification
  source 1..18: mol_type = other RNA
ttgcctccggttctgaag

SEQ ID NO: 4803 - RNA, 18 nt, synthetic construct
  modified_base 1: mod_base = OTHER; note = thymine
  misc_feature 1..18: note = Antisense oligonucleotide
  modified_base 1: mod_base = OTHER; note = misc_feature - bicyclic nucleic acid scaffold modification
  modified_base 5: mod_base = OTHER; note = misc_feature - bicyclic nucleic acid scaffold modification
  modified_base 13: mod_base = OTHER; note = misc_feature - bicyclic nucleic acid scaffold modification
  modified_base 18: mod_base = OTHER; note = misc_feature - bicyclic nucleic acid scaffold modification
  source 1..18: mol_type = other RNA
ttgcctccggttctgaag

SEQ ID NO: 4804 - RNA, 18 nt, synthetic construct
  modified_base 1..2: mod_base = OTHER; note = thymine
  misc_feature 1..18: note = Antisense oligonucleotide
  modified_base 1..2: mod_base = OTHER; note = misc_feature - bicyclic nucleic acid scaffold modification
  modified_base 17..18: mod_base = OTHER; note = misc_feature - bicyclic nucleic acid scaffold modification
  source 1..18: mol_type = other RNA
ttgcctccggttctgaag

SEQ ID NO: 4805 - RNA, 18 nt, synthetic construct
  modified_base 1..2: mod_base = OTHER; note = thymine
  misc_feature 1..18: note = Antisense oligonucleotide
  modified_base 1..2: mod_base = OTHER; note = misc_feature - bicyclic nucleic acid scaffold modification
  modified_base 15: mod_base = OTHER; note = misc_feature - bicyclic nucleic acid scaffold modification
  modified_base 17..18: mod_base = OTHER; note = misc_feature - bicyclic nucleic acid scaffold modification
  source 1..18: mol_type = other RNA
ttgcctccggttctgaag

SEQ ID NO: 4806 - RNA, 18 nt, synthetic construct
  modified_base 1..2: mod_base = OTHER; note = thymine
  misc_feature 1..18: note = Antisense oligonucleotide
  modified_base 1..2: mod_base = OTHER; note = misc_feature - bicyclic nucleic acid scaffold modification
  modified_base 13: mod_base = OTHER; note = misc_feature - bicyclic nucleic acid scaffold modification
  modified_base 17..18: mod_base = OTHER; note = misc_feature - bicyclic nucleic acid scaffold modification
  source 1..18: mol_type = other RNA
ttgcctccggttctgaag

SEQ ID NO: 4807 - RNA, 18 nt, synthetic construct
  modified_base 1: mod_base = OTHER; note = thymine
  misc_feature 1..18: note = Antisense oligonucleotide
  modified_base 1: mod_base = OTHER; note = misc_feature - bicyclic nucleic acid scaffold modification
  modified_base 18: mod_base = OTHER; note = misc_feature - bicyclic nucleic acid scaffold modification
  source 1..18: mol_type = other RNA
tgcctccggttctgaagg

SEQ ID NO: 4808 - RNA, 18 nt, synthetic construct
  modified_base 1: mod_base = OTHER; note = thymine
  misc_feature 1..18: note = Antisense oligonucleotide
  modified_base 1: mod_base = OTHER; note = misc_feature - bicyclic nucleic acid scaffold modification
  modified_base 14: mod_base = OTHER; note = misc_feature - bicyclic nucleic acid scaffold modification
  modified_base 18: mod_base = OTHER; note = misc_feature - bicyclic nucleic acid scaffold modification
  source 1..18: mol_type = other RNA
tgcctccggttctgaagg

SEQ ID NO: 4809 - RNA, 18 nt, synthetic construct
  modified_base 1: mod_base = OTHER; note = thymine
  misc_feature 1..18: note = Antisense oligonucleotide
  modified_base 1: mod_base = OTHER; note = misc_feature - bicyclic nucleic acid scaffold modification
  modified_base 12: mod_base = OTHER; note = misc_feature - bicyclic nucleic acid scaffold modification
  modified_base 18: mod_base = OTHER; note = misc_feature - bicyclic nucleic acid scaffold modification
  source 1..18: mol_type = other RNA
tgcctccggttctgaagg

SEQ ID NO: 4810 - RNA, 18 nt, synthetic construct
  modified_base 1: mod_base = OTHER; note = thymine
  misc_feature 1..18: note = Antisense oligonucleotide
  modified_base 1: mod_base = OTHER; note = misc_feature - bicyclic nucleic acid scaffold modification
  modified_base 9: mod_base = OTHER; note = misc_feature - bicyclic nucleic acid scaffold modification
  modified_base 18: mod_base = OTHER; note = misc_feature - bicyclic nucleic acid scaffold modification
  source 1..18: mol_type = other RNA
tgcctccggttctgaagg

SEQ ID NO: 4811 - RNA, 18 nt, synthetic construct
  modified_base 1: mod_base = OTHER; note = thymine
  misc_feature 1..18: note = Antisense oligonucleotide
  modified_base 1: mod_base = OTHER; note = misc_feature - bicyclic nucleic acid scaffold modification
  modified_base 4: mod_base = OTHER; note = misc_feature - bicyclic nucleic acid scaffold modification
  modified_base 18: mod_base = OTHER; note = misc_feature - bicyclic nucleic acid scaffold modification
  source 1..18: mol_type = other RNA
tgcctccggttctgaagg

SEQ ID NO: 4812 - RNA, 18 nt, synthetic construct
  modified_base 1: mod_base = OTHER; note = thymine
  misc_feature 1..18: note = Antisense oligonucleotide
  modified_base 1: mod_base = OTHER; note = misc_feature - bicyclic nucleic acid scaffold modification
  modified_base 9: mod_base = OTHER; note = misc_feature - bicyclic nucleic acid scaffold modification
  modified_base 14: mod_base = OTHER; note = misc_feature - bicyclic nucleic acid scaffold modification
  modified_base 18: mod_base = OTHER; note = misc_feature - bicyclic nucleic acid scaffold modification
  source 1..18: mol_type = other RNA
tgcctccggttctgaagg

SEQ ID NO: 4813 - RNA, 18 nt, synthetic construct
  modified_base 1: mod_base = OTHER; note = thymine
  misc_feature 1..18: note = Antisense oligonucleotide
  modified_base 1: mod_base = OTHER; note = misc_feature - bicyclic nucleic acid scaffold modification
  modified_base 4: mod_base = OTHER; note = misc_feature - bicyclic nucleic acid scaffold modification
  modified_base 12: mod_base = OTHER; note = misc_feature - bicyclic nucleic acid scaffold modification
  modified_base 18: mod_base = OTHER; note = misc_feature - bicyclic nucleic acid scaffold modification
  source 1..18: mol_type = other RNA
tgcctccggttctgaagg

SEQ ID NO: 4814 - RNA, 18 nt, synthetic construct
  modified_base 1: mod_base = OTHER; note = thymine
  misc_feature 1..18: note = Antisense oligonucleotide
  modified_base 1: mod_base = OTHER; note = misc_feature - bicyclic nucleic acid scaffold modification
  modified_base 4: mod_base = OTHER; note = misc_feature - bicyclic nucleic acid scaffold modification
  modified_base 14: mod_base = OTHER; note = misc_feature - bicyclic nucleic acid scaffold modification
  modified_base 18: mod_base = OTHER; note = misc_feature - bicyclic nucleic acid scaffold modification
  source 1..18: mol_type = other RNA
tgcctccggttctgaagg

SEQ ID NO: 4815 - RNA, 18 nt, synthetic construct
  modified_base 1: mod_base = OTHER; note = thymine
  misc_feature 1..18: note = Antisense oligonucleotide
  modified_base 1..2: mod_base = OTHER; note = misc_feature - bicyclic nucleic acid scaffold modification
  modified_base 17..18: mod_base = OTHER; note = misc_feature - bicyclic nucleic acid scaffold modification
  source 1..18: mol_type = other RNA
tgcctccggttctgaagg

SEQ ID NO: 4816 - RNA, 18 nt, synthetic construct
  modified_base 1: mod_base = OTHER; note = thymine
  misc_feature 1..18: note = Antisense oligonucleotide
  modified_base 1..2: mod_base = OTHER; note = misc_feature - bicyclic nucleic acid scaffold modification
  modified_base 14: mod_base = OTHER; note = misc_feature - bicyclic nucleic acid scaffold modification
  modified_base 17..18: mod_base = OTHER; note = misc_feature - bicyclic nucleic acid scaffold modification
  source 1..18: mol_type = other RNA
tgcctccggttctgaagg

SEQ ID NO: 4817 - RNA, 18 nt, synthetic construct
  modified_base 1: mod_base = OTHER; note = thymine
  misc_feature 1..18: note = Antisense oligonucleotide
  modified_base 1..2: mod_base = OTHER; note = misc_feature - bicyclic nucleic acid scaffold modification
  modified_base 12: mod_base = OTHER; note = misc_feature - bicyclic nucleic acid scaffold modification
  modified_base 17..18: mod_base = OTHER; note = misc_feature - bicyclic nucleic acid scaffold modification
  source 1..18: mol_type = other RNA
tgcctccggttctgaagg

SEQ ID NO: 4818 - RNA, 18 nt, synthetic construct
  modified_base 18: mod_base = OTHER; note = thymine
  misc_feature 1..18: note = Antisense oligonucleotide
  modified_base 1: mod_base = OTHER; note = misc_feature - bicyclic nucleic acid scaffold modification
  modified_base 8: mod_base = OTHER; note = misc_feature - bicyclic nucleic acid scaffold modification
  modified_base 18: mod_base = OTHER; note = misc_feature - bicyclic nucleic acid scaffold modification
  source 1..18: mol_type = other RNA
gcctccggttctgaaggt

SEQ ID NO: 4819 - RNA, 18 nt, synthetic construct
  modified_base 18: mod_base = OTHER; note = thymine
  misc_feature 1..18: note = Antisense oligonucleotide
  modified_base 1: mod_base = OTHER; note = misc_feature - bicyclic nucleic acid scaffold modification
  modified_base 5: mod_base = OTHER; note = misc_feature - bicyclic nucleic acid scaffold modification
  modified_base 18: mod_base = OTHER; note = misc_feature - bicyclic nucleic acid scaffold modification
  source 1..18: mol_type = other RNA
gcctccggttctgaaggt

SEQ ID NO: 4820 - RNA, 18 nt, synthetic construct
  modified_base 18: mod_base = OTHER; note = thymine
  misc_feature 1..18: note = Antisense oligonucleotide
  modified_base 1: mod_base = OTHER; note = misc_feature - bicyclic nucleic acid scaffold modification
  modified_base 11: mod_base = OTHER; note = misc_feature - bicyclic nucleic acid scaffold modification
  modified_base 18: mod_base = OTHER; note = misc_feature - bicyclic nucleic acid scaffold modification
  source 1..18: mol_type = other RNA
gcctccggttctgaaggt

SEQ ID NO: 4821 - RNA, 18 nt, synthetic construct
  modified_base 18: mod_base = OTHER; note = thymine
  misc_feature 1..18: note = Antisense oligonucleotide
  modified_base 1: mod_base = OTHER; note = misc_feature - bicyclic nucleic acid scaffold modification
  modified_base 13: mod_base = OTHER; note = misc_feature - bicyclic nucleic acid scaffold modification
  modified_base 18: mod_base = OTHER; note = misc_feature - bicyclic nucleic acid scaffold modification
  source 1..18: mol_type = other RNA
gcctccggttctgaaggt

SEQ ID NO: 4822 - RNA, 18 nt, synthetic construct
  modified_base 18: mod_base = OTHER; note = thymine
  misc_feature 1..18: note = Antisense oligonucleotide
  modified_base 1: mod_base = OTHER; note = misc_feature - bicyclic nucleic acid scaffold modification
  modified_base 16: mod_base = OTHER; note = misc_feature - bicyclic nucleic acid scaffold modification
  modified_base 18: mod_base = OTHER; note = misc_feature - bicyclic nucleic acid scaffold modification
  source 1..18: mol_type = other RNA
gcctccggttctgaaggt

SEQ ID NO: 4823 - RNA, 18 nt, synthetic construct
  modified_base 18: mod_base = OTHER; note = thymine
  misc_feature 1..18: note = Antisense oligonucleotide
  modified_base 1: mod_base = OTHER; note = misc_feature - bicyclic nucleic acid scaffold modification
  modified_base 13: mod_base = OTHER; note = misc_feature - bicyclic nucleic acid scaffold modification
  modified_base 16: mod_base = OTHER; note = misc_feature - bicyclic nucleic acid scaffold modification
  modified_base 18: mod_base = OTHER; note = misc_feature - bicyclic nucleic acid scaffold modification
  source 1..18: mol_type = other RNA
gcctccggttctgaaggt

SEQ ID NO: 4824 - RNA, 18 nt, synthetic construct
  modified_base 18: mod_base = OTHER; note = thymine
  misc_feature 1..18: note = Antisense oligonucleotide
  modified_base 1: mod_base = OTHER; note = misc_feature - bicyclic nucleic acid scaffold modification
  modified_base 8: mod_base = OTHER; note = misc_feature - bicyclic nucleic acid scaffold modification
  modified_base 13: mod_base = OTHER; note = misc_feature - bicyclic nucleic acid scaffold modification
  modified_base 18: mod_base = OTHER; note = misc_feature - bicyclic nucleic acid scaffold modification
  source 1..18: mol_type = other RNA
gcctccggttctgaaggt

SEQ ID NO: 4825 - RNA, 18 nt, synthetic construct
  modified_base 18: mod_base = OTHER; note = thymine
  misc_feature 1..18: note = Antisense oligonucleotide
  modified_base 1: mod_base = OTHER; note = misc_feature - bicyclic nucleic acid scaffold modification
  modified_base 11: mod_base = OTHER; note = misc_feature - bicyclic nucleic acid scaffold modification
  modified_base 16: mod_base = OTHER; note = misc_feature - bicyclic nucleic acid scaffold modification
  modified_base 18: mod_base = OTHER; note = misc_feature - bicyclic nucleic acid scaffold modification
  source 1..18: mol_type = other RNA
gcctccggttctgaaggt

SEQ ID NO: 4826 - RNA, 18 nt, synthetic construct
  modified_base 18: mod_base = OTHER; note = thymine
  misc_feature 1..18: note = Antisense oligonucleotide
  modified_base 1: mod_base = OTHER; note = misc_feature - bicyclic nucleic acid scaffold modification
  modified_base 8: mod_base = OTHER; note = misc_feature - bicyclic nucleic acid scaffold modification
  modified_base 13: mod_base = OTHER; note = misc_feature - bicyclic nucleic acid scaffold modification
  modified_base 18: mod_base = OTHER; note = misc_feature - bicyclic nucleic acid scaffold modification
  source 1..18: mol_type = other RNA
gcctccggttctgaaggt

SEQ ID NO: 4827 - RNA, 18 nt, synthetic construct
  modified_base 18: mod_base = OTHER; note = thymine
  misc_feature 1..18: note = Antisense oligonucleotide
  modified_base 1..2: mod_base = OTHER; note = misc_feature - bicyclic nucleic acid scaffold modification
  modified_base 17..18: mod_base = OTHER; note = misc_feature - bicyclic nucleic acid scaffold modification
  source 1..18: mol_type = other RNA
gcctccggttctgaaggt

SEQ ID NO: 4828 - RNA, 18 nt, synthetic construct
  modified_base 18: mod_base = OTHER; note = thymine
  misc_feature 1..18: note = Antisense oligonucleotide
  modified_base 1..2: mod_base = OTHER; note = misc_feature - bicyclic nucleic acid scaffold modification
  modified_base 13: mod_base = OTHER; note = misc_feature - bicyclic nucleic acid scaffold modification
  modified_base 17..18: mod_base = OTHER; note = misc_feature - bicyclic nucleic acid scaffold modification
  source 1..18: mol_type = other RNA
gcctccggttctgaaggt

SEQ ID NO: 4829 - RNA, 18 nt, synthetic construct
  modified_base 18: mod_base = OTHER; note = thymine
  misc_feature 1..18: note = Antisense oligonucleotide
  modified_base 1..2: mod_base = OTHER; note = misc_feature - bicyclic nucleic acid scaffold modification
  modified_base 11: mod_base = OTHER; note = misc_feature - bicyclic nucleic acid scaffold modification
  modified_base 13: mod_base = OTHER; note = misc_feature - bicyclic nucleic acid scaffold modification
  modified_base 17..18: mod_base = OTHER; note = misc_feature - bicyclic nucleic acid scaffold modification
  source 1..18: mol_type = other RNA
gcctccggttctgaaggt

SEQ ID NO: 4830 - RNA, 18 nt, synthetic construct
  misc_feature 1..18: note = Antisense oligonucleotide
  modified_base 1: mod_base = OTHER; note = misc_feature - bicyclic nucleic acid scaffold modification
  modified_base 18: mod_base = OTHER; note = misc_feature - bicyclic nucleic acid scaffold modification
  source 1..18: mol_type = other RNA
cctccggttctgaaggtg

SEQ ID NO: 4831 - RNA, 18 nt, synthetic construct
  misc_feature 1..18: note = Antisense oligonucleotide
  modified_base 1: mod_base = OTHER; note = misc_feature - bicyclic nucleic acid scaffold modification
  modified_base 4: mod_base = OTHER; note = misc_feature - bicyclic nucleic acid scaffold modification
  modified_base 18: mod_base = OTHER; note = misc_feature - bicyclic nucleic acid scaffold modification
  source 1..18: mol_type = other RNA
cctccggttctgaaggtg

SEQ ID NO: 4832 - RNA, 18 nt, synthetic construct
  misc_feature 1..18: note = Antisense oligonucleotide
  modified_base 1: mod_base = OTHER; note = misc_feature - bicyclic nucleic acid scaffold modification
  modified_base 7: mod_base = OTHER; note = misc_feature - bicyclic nucleic acid scaffold modification
  modified_base 18: mod_base = OTHER; note = misc_feature - bicyclic nucleic acid scaffold modification
  source 1..18: mol_type = other RNA
cctccggttctgaaggtg

SEQ ID NO: 4833 - RNA, 18 nt, synthetic construct
  misc_feature 1..18: note = Antisense oligonucleotide
  modified_base 1: mod_base = OTHER; note = misc_feature - bicyclic nucleic acid scaffold modification
  modified_base 10: mod_base = OTHER; note = misc_feature - bicyclic nucleic acid scaffold modification
  modified_base 18: mod_base = OTHER; note = misc_feature - bicyclic nucleic acid scaffold modification
  source 1..18: mol_type = other RNA
cctccggttctgaaggtg

SEQ ID NO: 4834 - RNA, 18 nt, synthetic construct
  misc_feature 1..18: note = Antisense oligonucleotide
  modified_base 1: mod_base = OTHER; note = misc_feature - bicyclic nucleic acid scaffold modification
  modified_base 12: mod_base = OTHER; note = misc_feature - bicyclic nucleic acid scaffold modification
  modified_base 18: mod_base = OTHER; note = misc_feature - bicyclic nucleic acid scaffold modification
  source 1..18: mol_type = other RNA
cctccggttctgaaggtg

SEQ ID NO: 4835 - RNA, 18 nt, synthetic construct
  misc_feature 1..18: note = Antisense oligonucleotide
  modified_base 1: mod_base = OTHER; note = misc_feature - bicyclic nucleic acid scaffold modification
  modified_base 15: mod_base = OTHER; note = misc_feature - bicyclic nucleic acid scaffold modification
  modified_base 18: mod_base = OTHER; note = misc_feature - bicyclic nucleic acid scaffold modification
  source 1..18: mol_type = other RNA
cctccggttctgaaggtg

SEQ ID NO: 4836 - RNA, 18 nt, synthetic construct
  misc_feature 1..18: note = Antisense oligonucleotide
  modified_base 1: mod_base = OTHER; note = misc_feature - bicyclic nucleic acid scaffold modification
  modified_base 10: mod_base = OTHER; note = misc_feature - bicyclic nucleic acid scaffold modification
  modified_base 15: mod_base = OTHER; note = misc_feature - bicyclic nucleic acid scaffold modification
  modified_base 18: mod_base = OTHER; note = misc_feature - bicyclic nucleic acid scaffold modification
  source 1..18: mol_type = other RNA
cctccggttctgaaggtg

SEQ ID NO: 4837 - RNA, 18 nt, synthetic construct
  misc_feature 1..18: note = Antisense oligonucleotide
  modified_base 1: mod_base = OTHER; note = misc_feature - bicyclic nucleic acid scaffold modification
  modified_base 7: mod_base = OTHER; note = misc_feature - bicyclic nucleic acid scaffold modification
  modified_base 12: mod_base = OTHER; note = misc_feature - bicyclic nucleic acid scaffold modification
  modified_base 18: mod_base = OTHER; note = misc_feature - bicyclic nucleic acid scaffold modification
  source 1..18: mol_type = other RNA
cctccggttctgaaggtg

SEQ ID NO: 4838 - RNA, 18 nt, synthetic construct
  misc_feature 1..18: note = Antisense oligonucleotide
  modified_base 1: mod_base = OTHER; note = misc_feature - bicyclic nucleic acid scaffold modification
  modified_base 4: mod_base = OTHER; note = misc_feature - bicyclic nucleic acid scaffold modification
  modified_base 10: mod_base = OTHER; note = misc_feature - bicyclic nucleic acid scaffold modification
  modified_base 18: mod_base = OTHER; note = misc_feature - bicyclic nucleic acid scaffold modification
  source 1..18: mol_type = other RNA
cctccggttctgaaggtg

SEQ ID NO: 4839 - RNA, 18 nt, synthetic construct
  modified_base 17: mod_base = OTHER; note = thymine
  misc_feature 1..18: note = Antisense oligonucleotide
  modified_base 1..2: mod_base = OTHER; note = misc_feature - bicyclic nucleic acid scaffold modification
  modified_base 17..18: mod_base = OTHER; note = misc_feature - bicyclic nucleic acid scaffold modification
  source 1..18: mol_type = other RNA
cctccggttctgaaggtg

SEQ ID NO: 4840 - RNA, 18 nt, synthetic construct
  modified_base 17: mod_base = OTHER; note = thymine
  misc_feature 1..18: note = Antisense oligonucleotide
  modified_base 1..2: mod_base = OTHER; note = misc_feature - bicyclic nucleic acid scaffold modification
  modified_base 10: mod_base = OTHER; note = misc_feature - bicyclic nucleic acid scaffold modification
  modified_base 17..18: mod_base = OTHER; note = misc_feature - bicyclic nucleic acid scaffold modification
  source 1..18: mol_type = other RNA
cctccggttctgaaggtg

SEQ ID NO: 4841 - RNA, 18 nt, synthetic construct
  modified_base 17: mod_base = OTHER; note = thymine
  misc_feature 1..18: note = Antisense oligonucleotide
  modified_base 1..2: mod_base = OTHER; note = misc_feature - bicyclic nucleic acid scaffold modification
  modified_base 10: mod_base = OTHER; note = misc_feature - bicyclic nucleic acid scaffold modification
  modified_base 12: mod_base = OTHER; note = misc_feature - bicyclic nucleic acid scaffold modification
  modified_base 17..18: mod_base = OTHER; note = misc_feature - bicyclic nucleic acid scaffold modification
  source 1..18: mol_type = other RNA
cctccggttctgaaggtg

SEQ ID NO: 4842 - RNA, 18 nt, synthetic construct
  modified_base 18: mod_base = OTHER; note = thymine
  misc_feature 1..18: note = Antisense oligonucleotide
  modified_base 1: mod_base = OTHER; note = misc_feature - bicyclic nucleic acid scaffold modification
  modified_base 18: mod_base = OTHER; note = misc_feature - bicyclic nucleic acid scaffold modification
  source 1..18: mol_type = other RNA
ctccggttctgaaggtgt

SEQ ID NO: 4843 - RNA, 18 nt, synthetic construct
  modified_base 18: mod_base = OTHER; note = thymine
  misc_feature 1..18: note = Antisense oligonucleotide
  modified_base 1: mod_base = OTHER; note = misc_feature - bicyclic nucleic acid scaffold modification
  modified_base 6: mod_base = OTHER; note = misc_feature - bicyclic nucleic acid scaffold modification
  modified_base 18: mod_base = OTHER; note = misc_feature - bicyclic nucleic acid scaffold modification
  source 1..18: mol_type = other RNA
ctccggttctgaaggtgt

SEQ ID NO: 4844 - RNA, 18 nt, synthetic construct
  modified_base 18: mod_base = OTHER; note = thymine
  misc_feature 1..18: note = Antisense oligonucleotide
  modified_base 1: mod_base = OTHER; note = misc_feature - bicyclic nucleic acid scaffold modification
  modified_base 9: mod_base = OTHER; note = misc_feature - bicyclic nucleic acid scaffold modification
  modified_base 18: mod_base = OTHER; note = misc_feature - bicyclic nucleic acid scaffold modification
  source 1..18: mol_type = other RNA
ctccggttctgaaggtgt

SEQ ID NO: 4845 - RNA, 18 nt, synthetic construct
  modified_base 18: mod_base = OTHER; note = thymine
  misc_feature 1..18: note = Antisense oligonucleotide
  modified_base 1: mod_base = OTHER; note = misc_feature - bicyclic nucleic acid scaffold modification
  modified_base 11: mod_base = OTHER; note = misc_feature - bicyclic nucleic acid scaffold modification
  modified_base 18: mod_base = OTHER; note = misc_feature - bicyclic nucleic acid scaffold modification
  source 1..18: mol_type = other RNA
ctccggttctgaaggtgt

SEQ ID NO: 4846 - RNA, 18 nt, synthetic construct
  modified_base 18: mod_base = OTHER; note = thymine
  misc_feature 1..18: note = Antisense oligonucleotide
  modified_base 1: mod_base = OTHER; note = misc_feature - bicyclic nucleic acid scaffold modification
  modified_base 15: mod_base = OTHER; note = misc_feature - bicyclic nucleic acid scaffold modification
  modified_base 18: mod_base = OTHER; note = misc_feature - bicyclic nucleic acid scaffold modification
  source 1..18: mol_type = other RNA
ctccggttctgaaggtgt

SEQ ID NO: 4847 - RNA, 18 nt, synthetic construct
  modified_base 18: mod_base = OTHER; note = thymine
  misc_feature 1..18: note = Antisense oligonucleotide
  modified_base 1: mod_base = OTHER; note = misc_feature - bicyclic nucleic acid scaffold modification
  modified_base 9: mod_base = OTHER; note = misc_feature - bicyclic nucleic acid scaffold modification
  modified_base 14: mod_base = OTHER; note = misc_feature - bicyclic nucleic acid scaffold modification
  modified_base 18: mod_base = OTHER; note = misc_feature - bicyclic nucleic acid scaffold modification
  source 1..18: mol_type = other RNA
ctccggttctgaaggtgt

SEQ ID NO: 4848 - RNA, 18 nt, synthetic construct
  modified_base 18: mod_base = OTHER; note = thymine
  misc_feature 1..18: note = Antisense oligonucleotide
  modified_base 1: mod_base = OTHER; note = misc_feature - bicyclic nucleic acid scaffold modification
  modified_base 6: mod_base = OTHER; note = misc_feature - bicyclic nucleic acid scaffold modification
  modified_base 11: mod_base = OTHER; note = misc_feature - bicyclic nucleic acid scaffold modification
  modified_base 18: mod_base = OTHER; note = misc_feature - bicyclic nucleic acid scaffold modification
  source 1..18: mol_type = other RNA
ctccggttctgaaggtgt

SEQ ID NO: 4849 - RNA, 18 nt, synthetic construct
  modified_base 18: mod_base = OTHER; note = thymine
  misc_feature 1..18: note = Antisense oligonucleotide
  modified_base 1: mod_base = OTHER; note = misc_feature - bicyclic nucleic acid scaffold modification
  modified_base 6: mod_base = OTHER; note = misc_feature - bicyclic nucleic acid scaffold modification
  modified_base 11: mod_base = OTHER; note = misc_feature - bicyclic nucleic acid scaffold modification
  modified_base 15: mod_base = OTHER; note = misc_feature - bicyclic nucleic acid scaffold modification
  modified_base 18: mod_base = OTHER; note = misc_feature - bicyclic nucleic acid scaffold modification
  source 1..18: mol_type = other RNA
ctccggttctgaaggtgt

SEQ ID NO: 4850 - RNA, 18 nt, synthetic construct
  modified_base 2: mod_base = OTHER; note = thymine
  modified_base 18: mod_base = OTHER; note = thymine
  misc_feature 1..18: note = Antisense oligonucleotide
  modified_base 1..2: mod_base = OTHER; note = misc_feature - bicyclic nucleic acid scaffold modification
  modified_base 17..18: mod_base = OTHER; note = misc_feature - bicyclic nucleic acid scaffold modification
  source 1..18: mol_type = other RNA
ctccggttctgaaggtgt

SEQ ID NO: 4851 - RNA, 18 nt, synthetic construct
  modified_base 2: mod_base = OTHER; note = thymine
  modified_base 18: mod_base = OTHER; note = thymine
  misc_feature 1..18: note = Antisense oligonucleotide
  modified_base 1..2: mod_base = OTHER; note = misc_feature - bicyclic nucleic acid scaffold modification
  modified_base 9: mod_base = OTHER; note = misc_feature - bicyclic nucleic acid scaffold modification
  modified_base 17..18: mod_base = OTHER; note = misc_feature - bicyclic nucleic acid scaffold modification
  source 1..18: mol_type = other RNA
ctccggttctgaaggtgt

SEQ ID NO: 4852 - RNA, 18 nt, synthetic construct
  modified_base 2: mod_base = OTHER; note = thymine
  modified_base 18: mod_base = OTHER; note = thymine
  misc_feature 1..18: note = Antisense oligonucleotide
  modified_base 1..2: mod_base = OTHER; note = misc_feature - bicyclic nucleic acid scaffold modification
  modified_base 11: mod_base = OTHER; note = misc_feature - bicyclic nucleic acid scaffold modification
  modified_base 17..18: mod_base = OTHER; note = misc_feature - bicyclic nucleic acid scaffold modification
  source 1..18: mol_type = other RNA
ctccggttctgaaggtgt

SEQ ID NO: 4853 - RNA, 18 nt, synthetic construct
  modified_base 1: mod_base = OTHER; note = thymine
  modified_base 18: mod_base = OTHER; note = thymine
  misc_feature 1..18: note = Antisense oligonucleotide
  modified_base 1: mod_base = OTHER; note = misc_feature - bicyclic nucleic acid scaffold modification
  modified_base 18: mod_base = OTHER; note = misc_feature - bicyclic nucleic acid scaffold modification
  source 1..18: mol_type = other RNA
tccggttctgaaggtgtt

SEQ ID NO: 4854 - RNA, 18 nt, synthetic construct
  modified_base 1: mod_base = OTHER; note = thymine
  modified_base 18: mod_base = OTHER; note = thymine
  misc_feature 1..18: note = Antisense oligonucleotide
  modified_base 1: mod_base = OTHER; note = misc_feature - bicyclic nucleic acid scaffold modification
  modified_base 8: mod_base = OTHER; note = misc_feature - bicyclic nucleic acid scaffold modification
  modified_base 18: mod_base = OTHER; note = misc_feature - bicyclic nucleic acid scaffold modification
  source 1..18: mol_type = other RNA
tccggttctgaaggtgtt

SEQ ID NO: 4855 - RNA, 18 nt, synthetic construct
  modified_base 1: mod_base = OTHER; note = thymine
  modified_base 18: mod_base = OTHER; note = thymine
  misc_feature 1..18: note = Antisense oligonucleotide
  modified_base 1: mod_base = OTHER; note = misc_feature - bicyclic nucleic acid scaffold modification
  modified_base 10: mod_base = OTHER; note = misc_feature - bicyclic nucleic acid scaffold modification
  modified_base 18: mod_base = OTHER; note = misc_feature - bicyclic nucleic acid scaffold modification
  source 1..18: mol_type = other RNA
tccggttctgaaggtgtt

SEQ ID NO: 4856 - RNA, 18 nt, synthetic construct
  modified_base 1: mod_base = OTHER; note = thymine
  modified_base 18: mod_base = OTHER; note = thymine
  misc_feature 1..18: note = Antisense oligonucleotide
  modified_base 1: mod_base = OTHER; note = misc_feature - bicyclic nucleic acid scaffold modification
  modified_base 13: mod_base = OTHER; note = misc_feature - bicyclic nucleic acid scaffold modification
  modified_base 18: mod_base = OTHER; note = misc_feature - bicyclic nucleic acid scaffold modification
  source 1..18: mol_type = other RNA
tccggttctgaaggtgtt

SEQ ID NO: 4857 - RNA, 18 nt, synthetic construct
  modified_base 1: mod_base = OTHER; note = thymine
  modified_base 18: mod_base = OTHER; note = thymine
  misc_feature 1..18: note = Antisense oligonucleotide
  modified_base 1: mod_base = OTHER; note = misc_feature - bicyclic nucleic acid scaffold modification
  modified_base 16: mod_base = OTHER; note = misc_feature - bicyclic nucleic acid scaffold modification
  modified_base 18: mod_base = OTHER; note = misc_feature - bicyclic nucleic acid scaffold modification
  source 1..18: mol_type = other RNA
tccggttctgaaggtgtt

SEQ ID NO: 4858 - RNA, 18 nt, synthetic construct
  modified_base 1: mod_base = OTHER; note = thymine
  modified_base 18: mod_base = OTHER; note = thymine
  misc_feature 1..18: note = Antisense oligonucleotide
  modified_base 1: mod_base = OTHER; note = misc_feature - bicyclic nucleic acid scaffold modification
  modified_base 10: mod_base = OTHER; note = misc_feature - bicyclic nucleic acid scaffold modification
  modified_base 16: mod_base = OTHER; note = misc_feature - bicyclic nucleic acid scaffold modification
  modified_base 18: mod_base = OTHER; note = misc_feature - bicyclic nucleic acid scaffold modification
  source 1..18: mol_type = other RNA
tccggttctgaaggtgtt

SEQ ID NO: 4859 - RNA, 18 nt, synthetic construct
  modified_base 1: mod_base = OTHER; note = thymine
  modified_base 18: mod_base = OTHER; note = thymine
  misc_feature 1..18: note = Antisense oligonucleotide
  modified_base 1: mod_base = OTHER; note = misc_feature - bicyclic nucleic acid scaffold modification
  modified_base 8: mod_base = OTHER; note = misc_feature - bicyclic nucleic acid scaffold modification
  modified_base 16: mod_base = OTHER; note = misc_feature - bicyclic nucleic acid scaffold modification
  modified_base 18: mod_base = OTHER; note = misc_feature - bicyclic nucleic acid scaffold modification
  source 1..18: mol_type = other RNA
tccggttctgaaggtgtt

SEQ ID NO: 4860 - RNA, 18 nt, synthetic construct
  modified_base 1: mod_base = OTHER; note = thymine
  modified_base 18: mod_base = OTHER; note = thymine
  misc_feature 1..18: note = Antisense oligonucleotide
  modified_base 1: mod_base = OTHER; note = misc_feature - bicyclic nucleic acid scaffold modification
  modified_base 8: mod_base = OTHER; note = misc_feature - bicyclic nucleic acid scaffold modification
  modified_base 13: mod_base = OTHER; note = misc_feature - bicyclic nucleic acid scaffold modification
  modified_base 16: mod_base = OTHER; note = misc_feature - bicyclic nucleic acid scaffold modification
  modified_base 18: mod_base = OTHER; note = misc_feature - bicyclic nucleic acid scaffold modification
  source 1..18: mol_type = other RNA
tccggttctgaaggtgtt

SEQ ID NO: 4861 - RNA, 18 nt, synthetic construct
  modified_base 1: mod_base = OTHER; note = thymine
  modified_base 17..18: mod_base = OTHER; note = thymine
  misc_feature 1..18: note = Antisense oligonucleotide
  modified_base 1..2: mod_base = OTHER; note = misc_feature - bicyclic nucleic acid scaffold modification
  modified_base 17..18: mod_base = OTHER; note = misc_feature - bicyclic nucleic acid scaffold modification
  source 1..18: mol_type = other RNA
tccggttctgaaggtgtt

SEQ ID NO: 4862 - RNA, 18 nt, synthetic construct
  modified_base 1: mod_base = OTHER; note = thymine
  modified_base 17..18: mod_base = OTHER; note = thymine
  misc_feature 1..18: note = Antisense oligonucleotide
  modified_base 1..2: mod_base = OTHER; note = misc_feature - bicyclic nucleic acid scaffold modification
  modified_base 10: mod_base = OTHER; note = misc_feature - bicyclic nucleic acid scaffold modification
  modified_base 17..18: mod_base = OTHER; note = misc_feature - bicyclic nucleic acid scaffold modification
  source 1..18: mol_type = other RNA
tccggttctgaaggtgtt

SEQ ID NO: 4863 - RNA, 18 nt, synthetic construct
  modified_base 1: mod_base = OTHER; note = thymine
  modified_base 17..18: mod_base = OTHER; note = thymine
  misc_feature 1..18: note = Antisense oligonucleotide
  modified_base 1..2: mod_base = OTHER; note = misc_feature - bicyclic nucleic acid scaffold modification
  modified_base 8: mod_base = OTHER; note = misc_feature - bicyclic nucleic acid scaffold modification
  modified_base 10: mod_base = OTHER; note = misc_feature - bicyclic nucleic acid scaffold modification
  modified_base 17..18: mod_base = OTHER; note = misc_feature - bicyclic nucleic acid scaffold modification
  source 1..18: mol_type = other RNA
tccggttctgaaggtgtt

SEQ ID NO: 4864 - RNA, 18 nt, synthetic construct
  misc_feature 1..18: note = Antisense oligonucleotide
  modified_base 1: mod_base = OTHER; note = misc_feature - bicyclic nucleic acid scaffold modification
  modified_base 18: mod_base = OTHER; note = misc_feature - bicyclic nucleic acid scaffold modification
  source 1..18: mol_type = other RNA
ccggttctgaaggtgttc

SEQ ID NO: 4865 - RNA, 18 nt, synthetic construct
  misc_feature 1..18: note = Antisense oligonucleotide
  modified_base 1: mod_base = OTHER; note = misc_feature - bicyclic nucleic acid scaffold modification
  modified_base 7: mod_base = OTHER; note = misc_feature - bicyclic nucleic acid scaffold modification
  modified_base 18: mod_base = OTHER; note = misc_feature - bicyclic nucleic acid scaffold modification
  source 1..18: mol_type = other RNA
ccggttctgaaggtgttc

SEQ ID NO: 4866 - RNA, 18 nt, synthetic construct
  misc_feature 1..18: note = Antisense oligonucleotide
  modified_base 1: mod_base = OTHER; note = misc_feature - bicyclic nucleic acid scaffold modification
  modified_base 9: mod_base = OTHER; note = misc_feature - bicyclic nucleic acid scaffold modification
  modified_base 18: mod_base = OTHER; note = misc_feature - bicyclic nucleic acid scaffold modification
  source 1..18: mol_type = other RNA
ccggttctgaaggtgttc

SEQ ID NO: 4867 - RNA, 18 nt, synthetic construct
  misc_feature 1..18: note = Antisense oligonucleotide
  modified_base 1: mod_base = OTHER; note = misc_feature - bicyclic nucleic acid scaffold modification
  modified_base 12: mod_base = OTHER; note = misc_feature - bicyclic nucleic acid scaffold modification
  modified_base 18: mod_base = OTHER; note = misc_feature - bicyclic nucleic acid scaffold modification
  source 1..18: mol_type = other RNA
ccggttctgaaggtgttc

SEQ ID NO: 4868 - RNA, 18 nt, synthetic construct
  misc_feature 1..18: note = Antisense oligonucleotide
  modified_base 1: mod_base = OTHER; note = misc_feature - bicyclic nucleic acid scaffold modification
  modified_base 15: mod_base = OTHER; note = misc_feature - bicyclic nucleic acid scaffold modification
  modified_base 18: mod_base = OTHER; note = misc_feature - bicyclic nucleic acid scaffold modification
  source 1..18: mol_type = other RNA
ccggttctgaaggtgttc

SEQ ID NO: 4869 - RNA, 18 nt, synthetic construct
  misc_feature 1..18: note = Antisense oligonucleotide
  modified_base 1: mod_base = OTHER; note = misc_feature - bicyclic nucleic acid scaffold modification
  modified_base 9: mod_base = OTHER; note = misc_feature - bicyclic nucleic acid scaffold modification
  modified_base 15: mod_base = OTHER; note = misc_feature - bicyclic nucleic acid scaffold modification
  modified_base 18: mod_base = OTHER; note = misc_feature - bicyclic nucleic acid scaffold modification
  source 1..18: mol_type = other RNA
ccggttctgaaggtgttc

SEQ ID NO: 4870 - RNA, 18 nt, synthetic construct
  misc_feature 1..18: note = Antisense oligonucleotide
  modified_base 1: mod_base = OTHER; note = misc_feature - bicyclic nucleic acid scaffold modification
  modified_base 7: mod_base = OTHER; note = misc_feature - bicyclic nucleic acid scaffold modification
  modified_base 12: mod_base = OTHER; note = misc_feature - bicyclic nucleic acid scaffold modification
  modified_base 18: mod_base = OTHER; note = misc_feature - bicyclic nucleic acid scaffold modification
  source 1..18: mol_type = other RNA
ccggttctgaaggtgttc

SEQ ID NO: 4871 - RNA, 18 nt, synthetic construct
  misc_feature 1..18: note = Antisense oligonucleotide
  modified_base 1: mod_base = OTHER; note = misc_feature - bicyclic nucleic acid scaffold modification
  modified_base 4: mod_base = OTHER; note = misc_feature - bicyclic nucleic acid scaffold modification
  modified_base 9: mod_base = OTHER; note = misc_feature - bicyclic nucleic acid scaffold modification
  modified_base 15: mod_base = OTHER; note = misc_feature - bicyclic nucleic acid scaffold modification
  modified_base 18: mod_base = OTHER; note = misc_feature - bicyclic nucleic acid scaffold modification
  source 1..18: mol_type = other RNA
ccggttctgaaggtgttc

SEQ ID NO: 4872 - RNA, 18 nt, synthetic construct
  modified_base 17: mod_base = OTHER; note = thymine
  misc_feature 1..18: note = Antisense oligonucleotide
  modified_base 1..2: mod_base = OTHER; note = misc_feature - bicyclic nucleic acid scaffold modification
  modified_base 17..18: mod_base = OTHER; note = misc_feature - bicyclic nucleic acid scaffold modification
  source 1..18: mol_type = other RNA
ccggttctgaaggtgttc

SEQ ID NO: 4873 - RNA, 18 nt, synthetic construct
  modified_base 17: mod_base = OTHER; note = thymine
  misc_feature 1..18: note = Antisense oligonucleotide
  modified_base 1..2: mod_base = OTHER; note = misc_feature - bicyclic nucleic acid scaffold modification
  modified_base 9: mod_base = OTHER; note = misc_feature - bicyclic nucleic acid scaffold modification
  modified_base 17..18: mod_base = OTHER; note = misc_feature - bicyclic nucleic acid scaffold modification
  source 1..18: mol_type = other RNA
ccggttctgaaggtgttc

SEQ ID NO: 4874 - RNA, 18 nt, synthetic construct
  modified_base 17: mod_base = OTHER; note = thymine
  misc_feature 1..18: note = Antisense oligonucleotide
  modified_base 1..2: mod_base = OTHER; note = misc_feature - bicyclic nucleic acid scaffold modification
  modified_base 7: mod_base = OTHER; note = misc_feature - bicyclic nucleic acid scaffold modification
  modified_base 15: mod_base = OTHER; note = misc_feature - bicyclic nucleic acid scaffold modification
  modified_base 17..18: mod_base = OTHER; note = misc_feature - bicyclic nucleic acid scaffold modification
  source 1..18: mol_type = other RNA
ccggttctgaaggtgttc

SEQ ID NO: 4875 - RNA, 16 nt, synthetic construct
  misc_feature 1..16: note = Antisense oligonucleotide
  modified_base 1: mod_base = OTHER; note = misc_feature - bicyclic nucleic acid scaffold modification
  modified_base 16: mod_base = OTHER; note = misc_feature - bicyclic nucleic acid scaffold modification
  source 1..16: mol_type = other RNA
gttgcctccggttctg

SEQ ID NO: 4876 - RNA, 16 nt, synthetic construct
  misc_feature 1..16: note = Antisense oligonucleotide
  modified_base 1: mod_base = OTHER; note = misc_feature - bicyclic nucleic acid scaffold modification
  modified_base 14: mod_base = OTHER; note = misc_feature - bicyclic nucleic acid scaffold modification
  modified_base 16: mod_base = OTHER; note = misc_feature - bicyclic nucleic acid scaffold modification
  source 1..16: mol_type = other RNA
gttgcctccggttctg

SEQ ID NO: 4877 - RNA, 16 nt, synthetic construct
  misc_feature 1..16: note = Antisense oligonucleotide
  modified_base 1: mod_base = OTHER; note = misc_feature - bicyclic nucleic acid scaffold modification
  modified_base 11: mod_base = OTHER; note = misc_feature - bicyclic nucleic acid scaffold modification
  modified_base 16: mod_base = OTHER; note = misc_feature - bicyclic nucleic acid scaffold modification
  source 1..16: mol_type = other RNA
gttgcctccggttctg

SEQ ID NO: 4878 - RNA, 16 nt, synthetic construct
  misc_feature 1..16: note = Antisense oligonucleotide
  modified_base 1: mod_base = OTHER; note = misc_feature - bicyclic nucleic acid scaffold modification
  modified_base 8: mod_base = OTHER; note = misc_feature - bicyclic nucleic acid scaffold modification
  modified_base 16: mod_base = OTHER; note = misc_feature - bicyclic nucleic acid scaffold modification
  source 1..16: mol_type = other RNA
gttgcctccggttctg

SEQ ID NO: 4879 - RNA, 16 nt, synthetic construct
  misc_feature 1..16: note = Antisense oligonucleotide
  modified_base 1: mod_base = OTHER; note = misc_feature - bicyclic nucleic acid scaffold modification
  modified_base 4: mod_base = OTHER; note = misc_feature - bicyclic nucleic acid scaffold modification
  modified_base 16: mod_base = OTHER; note = misc_feature - bicyclic nucleic acid scaffold modification
  source 1..16: mol_type = other RNA
gttgcctccggttctg

SEQ ID NO: 4880 - RNA, 16 nt, synthetic construct
  misc_feature 1..16: note = Antisense oligonucleotide
  modified_base 1: mod_base = OTHER; note = misc_feature - bicyclic nucleic acid scaffold modification
  modified_base 4: mod_base = OTHER; note = misc_feature - bicyclic nucleic acid scaffold modification
  modified_base 14: mod_base = OTHER; note = misc_feature - bicyclic nucleic acid scaffold modification
  modified_base 16: mod_base = OTHER; note = misc_feature - bicyclic nucleic acid scaffold modification
  source 1..16: mol_type = other RNA
gttgcctccggttctg

SEQ ID NO: 4881 - RNA, 16 nt, synthetic construct
  misc_feature 1..16: note = Antisense oligonucleotide
  modified_base 1: mod_base = OTHER; note = misc_feature - bicyclic nucleic acid scaffold modification
  modified_base 6: mod_base = OTHER; note = misc_feature - bicyclic nucleic acid scaffold modification
  modified_base 11: mod_base = OTHER; note = misc_feature - bicyclic nucleic acid scaffold modification
  modified_base 16: mod_base = OTHER; note = misc_feature - bicyclic nucleic acid scaffold modification
  source 1..16: mol_type = other RNA
gttgcctccggttctg

SEQ ID NO: 4882 - RNA, 16 nt, synthetic construct
  misc_feature 1..16: note = Antisense oligonucleotide
  modified_base 1: mod_base = OTHER; note = misc_feature - bicyclic nucleic acid scaffold modification
  modified_base 8: mod_base = OTHER; note = misc_feature - bicyclic nucleic acid scaffold modification
  modified_base 14: mod_base = OTHER; note = misc_feature - bicyclic nucleic acid scaffold modification
  modified_base 16: mod_base = OTHER; note = misc_feature - bicyclic nucleic acid scaffold modification
  source 1..16: mol_type = other RNA
gttgcctccggttctg

SEQ ID NO: 4883 - RNA, 16 nt, synthetic construct
  modified_base 2: mod_base = OTHER; note = thymine
  modified_base 15: mod_base = OTHER; note = thymine
  misc_feature 1..16: note = Antisense oligonucleotide
  modified_base 1..2: mod_base = OTHER; note = misc_feature - bicyclic nucleic acid scaffold modification
  modified_base 15..16: mod_base = OTHER; note = misc_feature - bicyclic nucleic acid scaffold modification
  source 1..16: mol_type = other RNA
gttgcctccggttctg

SEQ ID NO: 4884 - RNA, 16 nt, synthetic construct
  modified_base 2: mod_base = OTHER; note = thymine
  modified_base 15: mod_base = OTHER; note = thymine
  misc_feature 1..16: note = Antisense oligonucleotide
  modified_base 1..2: mod_base = OTHER; note = misc_feature - bicyclic nucleic acid scaffold modification
  modified_base 6: mod_base = OTHER; note = misc_feature - bicyclic nucleic acid scaffold modification
  modified_base 15..16: mod_base = OTHER; note = misc_feature - bicyclic nucleic acid scaffold modification
  source 1..16: mol_type = other RNA
gttgcctccggttctg

SEQ ID NO: 4885 - RNA, 16 nt, synthetic construct
  modified_base 2: mod_base = OTHER; note = thymine
  modified_base 15: mod_base = OTHER; note = thymine
  misc_feature 1..16: note = Antisense oligonucleotide
  modified_base 1..2: mod_base = OTHER; note = misc_feature - bicyclic nucleic acid scaffold modification
  modified_base 11: mod_base = OTHER; note = misc_feature - bicyclic nucleic acid scaffold modification
  modified_base 15..16: mod_base = OTHER; note = misc_feature - bicyclic nucleic acid scaffold modification
  source 1..16: mol_type = other RNA
gttgcctccggttctg

SEQ ID NO: 4886 - RNA, 16 nt, synthetic construct
  modified_base 1: mod_base = OTHER; note = thymine
  misc_feature 1..16: note = Antisense oligonucleotide
  modified_base 1: mod_base = OTHER; note = misc_feature - bicyclic nucleic acid scaffold modification
  modified_base 16: mod_base = OTHER; note = misc_feature - bicyclic nucleic acid scaffold modification
  source 1..16: mol_type = other RNA
ttgcctccggttctga

SEQ ID NO: 4887 - RNA, 16 nt, synthetic construct
  modified_base 1: mod_base = OTHER; note = thymine
  misc_feature 1..16: note = Antisense oligonucleotide
  modified_base 1: mod_base = OTHER; note = misc_feature - bicyclic nucleic acid scaffold modification
  modified_base 13: mod_base = OTHER; note = misc_feature - bicyclic nucleic acid scaffold modification
  modified_base 16: mod_base = OTHER; note = misc_feature - bicyclic nucleic acid scaffold modification
  source 1..16: mol_type = other RNA
ttgcctccggttctga

SEQ ID NO: 4888 - RNA, 16 nt, synthetic construct
  modified_base 1: mod_base = OTHER; note = thymine
  misc_feature 1..16: note = Antisense oligonucleotide
  modified_base 1: mod_base = OTHER; note = misc_feature - bicyclic nucleic acid scaffold modification
  modified_base 10: mod_base = OTHER; note = misc_feature - bicyclic nucleic acid scaffold modification
  modified_base 16: mod_base = OTHER; note = misc_feature - bicyclic nucleic acid scaffold modification
  source 1..16: mol_type = other RNA
ttgcctccggttctga

SEQ ID NO: 4889 - RNA, 16 nt, synthetic construct
  modified_base 1: mod_base = OTHER; note = thymine
  misc_feature 1..16: note = Antisense oligonucleotide
  modified_base 1: mod_base = OTHER; note = misc_feature - bicyclic nucleic acid scaffold modification
  modified_base 5: mod_base = OTHER; note = misc_feature - bicyclic nucleic acid scaffold modification
  modified_base 16: mod_base = OTHER; note = misc_feature - bicyclic nucleic acid scaffold modification
  source 1..16: mol_type = other RNA
ttgcctccggttctga

SEQ ID NO: 4890 - RNA, 16 nt, synthetic construct
  modified_base 1: mod_base = OTHER; note = thymine
  misc_feature 1..16: note = Antisense oligonucleotide
  modified_base 1: mod_base = OTHER; note = misc_feature - bicyclic nucleic acid scaffold modification
  modified_base 3: mod_base = OTHER; note = misc_feature - bicyclic nucleic acid scaffold modification
  modified_base 16: mod_base = OTHER; note = misc_feature - bicyclic nucleic acid scaffold modification
  source 1..16: mol_type = other RNA
ttgcctccggttctga

SEQ ID NO: 4891 - RNA, 16 nt, synthetic construct
  modified_base 1: mod_base = OTHER; note = thymine
  misc_feature 1..16: note = Antisense oligonucleotide
  modified_base 1: mod_base = OTHER; note = misc_feature - bicyclic nucleic acid scaffold modification
  modified_base 5: mod_base = OTHER; note = misc_feature - bicyclic nucleic acid scaffold modification
  modified_base 13: mod_base = OTHER; note = misc_feature - bicyclic nucleic acid scaffold modification
  modified_base 16: mod_base = OTHER; note = misc_feature - bicyclic nucleic acid scaffold modification
  source 1..16: mol_type = other RNA
ttgcctccggttctga

SEQ ID NO: 4892 - RNA, 16 nt, synthetic construct
  modified_base 1: mod_base = OTHER; note = thymine
  misc_feature 1..16: note = Antisense oligonucleotide
  modified_base 1: mod_base = OTHER; note = misc_feature - bicyclic nucleic acid scaffold modification
  modified_base 7: mod_base = OTHER; note = misc_feature - bicyclic nucleic acid scaffold modification
  modified_base 10: mod_base = OTHER; note = misc_feature - bicyclic nucleic acid scaffold modification
  modified_base 16: mod_base = OTHER; note = misc_feature - bicyclic nucleic acid scaffold modification
  source 1..16: mol_type = other RNA
ttgcctccggttctga

SEQ ID NO: 4893 - RNA, 16 nt, synthetic construct
  modified_base 1: mod_base = OTHER; note = thymine
  misc_feature 1..16: note = Antisense oligonucleotide
  modified_base 1: mod_base = OTHER; note = misc_feature - bicyclic nucleic acid scaffold modification
  modified_base 15..16: mod_base = OTHER; note = misc_feature - bicyclic nucleic acid scaffold modification
  source 1..16: mol_type = other RNA
ttgcctccggttctga

SEQ ID NO: 4894 - RNA, 16 nt, synthetic construct
  modified_base 1..2: mod_base = OTHER; note = thymine
  misc_feature 1..16: note = Antisense oligonucleotide
  modified_base 1..2: mod_base = OTHER; note = misc_feature - bicyclic nucleic acid scaffold modification
  modified_base 16: mod_base = OTHER; note = misc_feature - bicyclic nucleic acid scaffold modification
  source 1..16: mol_type = other RNA
ttgcctccggttctga

SEQ ID NO: 4895 - RNA, 16 nt, synthetic construct
  modified_base 1..2: mod_base = OTHER; note = thymine
  misc_feature 1..16: note = Antisense oligonucleotide
  modified_base 1..2: mod_base = OTHER; note = misc_feature - bicyclic nucleic acid scaffold modification
  modified_base 15..16: mod_base = OTHER; note = misc_feature - bicyclic nucleic acid scaffold modification
  source 1..16: mol_type = other RNA
ttgcctccggttctga

SEQ ID NO: 4896 - RNA, 16 nt, synthetic construct
  modified_base 1..2: mod_base = OTHER; note = thymine
  misc_feature 1..16: note = Antisense oligonucleotide
  modified_base 1..2: mod_base = OTHER; note = misc_feature - bicyclic nucleic acid scaffold modification
  modified_base 7: mod_base = OTHER; note = misc_feature - bicyclic nucleic acid scaffold modification
  modified_base 13: mod_base = OTHER; note = misc_feature - bicyclic nucleic acid scaffold modification
  modified_base 15..16: mod_base = OTHER; note = misc_feature - bicyclic nucleic acid scaffold modification
  source 1..16: mol_type = other RNA
ttgcctccggttctga

SEQ ID NO: 4897 - RNA, 16 nt, synthetic construct
  modified_base 1: mod_base = OTHER; note = thymine
  misc_feature 1..16: note = Antisense oligonucleotide
  modified_base 1: mod_base = OTHER; note = misc_feature - bicyclic nucleic acid scaffold modification
  modified_base 16: mod_base = OTHER; note = misc_feature - bicyclic nucleic acid scaffold modification
  source 1..16: mol_type = other RNA
tgcctccggttctgaa

SEQ ID NO: 4898 - RNA, 16 nt, synthetic construct
  modified_base 1: mod_base = OTHER; note = thymine
  misc_feature 1..16: note = Antisense oligonucleotide
  modified_base 1: mod_base = OTHER; note = misc_feature - bicyclic nucleic acid scaffold modification
  modified_base 4: mod_base = OTHER; note = misc_feature - bicyclic nucleic acid scaffold modification
  modified_base 16: mod_base = OTHER; note = misc_feature - bicyclic nucleic acid scaffold modification
  source 1..16: mol_type = other RNA
tgcctccggttctgaa

SEQ ID NO: 4899 - RNA, 16 nt, synthetic construct
  modified_base 1: mod_base = OTHER; note = thymine
  misc_feature 1..16: note = Antisense oligonucleotide
  modified_base 1: mod_base = OTHER; note = misc_feature - bicyclic nucleic acid scaffold modification
  modified_base 9: mod_base = OTHER; note = misc_feature - bicyclic nucleic acid scaffold modification
  modified_base 16: mod_base = OTHER; note = misc_feature - bicyclic nucleic acid scaffold modification
  source 1..16: mol_type = other RNA
tgcctccggttctgaa

SEQ ID NO: 4900 - RNA, 16 nt, synthetic construct
  modified_base 1: mod_base = OTHER; note = thymine
  misc_feature 1..16: note = Antisense oligonucleotide
  modified_base 1: mod_base = OTHER; note = misc_feature - bicyclic nucleic acid scaffold modification
  modified_base 12: mod_base = OTHER; note = misc_feature - bicyclic nucleic acid scaffold modification
  modified_base 16: mod_base = OTHER; note = misc_feature - bicyclic nucleic acid scaffold modification
  source 1..16: mol_type = other RNA
tgcctccggttctgaa

SEQ ID NO: 4901 - RNA, 16 nt, synthetic construct
  modified_base 1: mod_base = OTHER; note = thymine
  misc_feature 1..16: note = Antisense oligonucleotide
  modified_base 1: mod_base = OTHER; note = misc_feature - bicyclic nucleic acid scaffold modification
  modified_base 14: mod_base = OTHER; note = misc_feature - bicyclic nucleic acid scaffold modification
  modified_base 16: mod_base = OTHER; note = misc_feature - bicyclic nucleic acid scaffold modification
  source 1..16: mol_type = other RNA
tgcctccggttctgaa

SEQ ID NO: 4902 - RNA, 16 nt, synthetic construct
  modified_base 1: mod_base = OTHER; note = thymine
  misc_feature 1..16: note = Antisense oligonucleotide
  modified_base 1: mod_base = OTHER; note = misc_feature - bicyclic nucleic acid scaffold modification
  modified_base 12: mod_base = OTHER; note = misc_feature - bicyclic nucleic acid scaffold modification
  modified_base 14: mod_base = OTHER; note = misc_feature - bicyclic nucleic acid scaffold modification
  modified_base 16: mod_base = OTHER; note = misc_feature - bicyclic nucleic acid scaffold modification
  source 1..16: mol_type = other RNA
tgcctccggttctgaa

SEQ ID NO: 4903 - RNA, 16 nt, synthetic construct
  modified_base 1: mod_base = OTHER; note = thymine
  misc_feature 1..16: note = Antisense oligonucleotide
  modified_base 1: mod_base = OTHER; note = misc_feature - bicyclic nucleic acid scaffold modification
  modified_base 9: mod_base = OTHER; note = misc_feature - bicyclic nucleic acid scaffold modification
  modified_base 14: mod_base = OTHER; note = misc_feature - bicyclic nucleic acid scaffold modification
  modified_base 16: mod_base = OTHER; note = misc_feature - bicyclic nucleic acid scaffold modification
  source 1..16: mol_type = other RNA
tgcctccggttctgaa

SEQ ID NO: 4904 - RNA, 16 nt, synthetic construct
  modified_base 1: mod_base = OTHER; note = thymine
  misc_feature 1..16: note = Antisense oligonucleotide
  modified_base 1: mod_base = OTHER; note = misc_feature - bicyclic nucleic acid scaffold modification
  modified_base 4: mod_base = OTHER; note = misc_feature - bicyclic nucleic acid scaffold modification
  modified_base 9: mod_base = OTHER; note = misc_feature - bicyclic nucleic acid scaffold modification
  modified_base 16: mod_base = OTHER; note = misc_feature - bicyclic nucleic acid scaffold modification
  source 1..16: mol_type = other RNA
tgcctccggttctgaa

SEQ ID NO: 4905 - RNA, 16 nt, synthetic construct
  modified_base 1: mod_base = OTHER; note = thymine
  misc_feature 1..16: note = Antisense oligonucleotide
  modified_base 1..2: mod_base = OTHER; note = misc_feature - bicyclic nucleic acid scaffold modification
  modified_base 15..16: mod_base = OTHER; note = misc_feature - bicyclic nucleic acid scaffold modification
  source 1..16: mol_type = other RNA
tgcctccggttctgaa

SEQ ID NO: 4906 - RNA, 16 nt, synthetic construct
  modified_base 1: mod_base = OTHER; note = thymine
  misc_feature 1..16: note = Antisense oligonucleotide
  modified_base 1..2: mod_base = OTHER; note = misc_feature - bicyclic nucleic acid scaffold modification
  modified_base 12: mod_base = OTHER; note = misc_feature - bicyclic nucleic acid scaffold modification
  modified_base 15..16: mod_base = OTHER; note = misc_feature - bicyclic nucleic acid scaffold modification
  source 1..16: mol_type = other RNA
tgcctccggttctgaa

SEQ ID NO: 4907 - RNA, 16 nt, synthetic construct
  modified_base 1: mod_base = OTHER; note = thymine
  misc_feature 1..16: note = Antisense oligonucleotide
  modified_base 1..2: mod_base = OTHER; note = misc_feature - bicyclic nucleic acid scaffold modification
  modified_base 14..16: mod_base = OTHER; note = misc_feature - bicyclic nucleic acid scaffold modification
  source 1..16: mol_type = other RNA
tgcctccggttctgaa

SEQ ID NO: 4908 - RNA, 16 nt, synthetic construct
  misc_feature 1..16: note = Antisense oligonucleotide
  modified_base 1: mod_base = OTHER; note = misc_feature - bicyclic nucleic acid scaffold modification
  modified_base 16: mod_base = OTHER; note = misc_feature - bicyclic nucleic acid scaffold modification
  source 1..16: mol_type = other RNA
gcctccggttctgaag

SEQ ID NO: 4909 - RNA, 16 nt, synthetic construct
  misc_feature 1..16: note = Antisense oligonucleotide
  modified_base 1: mod_base = OTHER; note = misc_feature - bicyclic nucleic acid scaffold modification
  modified_base 11: mod_base = OTHER; note = misc_feature - bicyclic nucleic acid scaffold modification
  modified_base 16: mod_base = OTHER; note = misc_feature - bicyclic nucleic acid scaffold modification
  source 1..16: mol_type = other RNA
gcctccggttctgaag

SEQ ID NO: 4910 - RNA, 16 nt, synthetic construct
  misc_feature 1..16: note = Antisense oligonucleotide
  modified_base 1: mod_base = OTHER; note = misc_feature - bicyclic nucleic acid scaffold modification
  modified_base 13: mod_base = OTHER; note = misc_feature - bicyclic nucleic acid scaffold modification
  modified_base 16: mod_base = OTHER; note = misc_feature - bicyclic nucleic acid scaffold modification
  source 1..16: mol_type = other RNA
gcctccggttctgaag

SEQ ID NO: 4911 - RNA, 16 nt, synthetic construct
  misc_feature 1..16: note = Antisense oligonucleotide
  modified_base 1: mod_base = OTHER; note = misc_feature - bicyclic nucleic acid scaffold modification
  modified_base 8: mod_base = OTHER; note = misc_feature - bicyclic nucleic acid scaffold modification
  modified_base 16: mod_base = OTHER; note = misc_feature - bicyclic nucleic acid scaffold modification
  source 1..16: mol_type = other RNA
gcctccggttctgaag

SEQ ID NO: 4912 - RNA, 16 nt, synthetic construct
  misc_feature 1..16: note = Antisense oligonucleotide
  modified_base 1: mod_base = OTHER; note = misc_feature - bicyclic nucleic acid scaffold modification
  modified_base 3: mod_base = OTHER; note = misc_feature - bicyclic nucleic acid scaffold modification
  modified_base 16: mod_base = OTHER; note = misc_feature - bicyclic nucleic acid scaffold modification
  source 1..16: mol_type = other RNA
gcctccggttctgaag

SEQ ID NO: 4913 - RNA, 16 nt, synthetic construct
  misc_feature 1..16: note = Antisense oligonucleotide
  modified_base 1: mod_base = OTHER; note = misc_feature - bicyclic nucleic acid scaffold modification
  modified_base 3: mod_base = OTHER; note = misc_feature - bicyclic nucleic acid scaffold modification
  modified_base 13: mod_base = OTHER; note = misc_feature - bicyclic nucleic acid scaffold modification
  modified_base 16: mod_base = OTHER; note = misc_feature - bicyclic nucleic acid scaffold modification
  source 1..16: mol_type = other RNA
gcctccggttctgaag

SEQ ID NO: 4914 - RNA, 16 nt, synthetic construct
  misc_feature 1..16: note = Antisense oligonucleotide
  modified_base 1: mod_base = OTHER; note = misc_feature - bicyclic nucleic acid scaffold modification
  modified_base 5: mod_base = OTHER; note = misc_feature - bicyclic nucleic acid scaffold modification
  modified_base 11: mod_base = OTHER; note = misc_feature - bicyclic nucleic acid scaffold modification
  modified_base 16: mod_base = OTHER; note = misc_feature - bicyclic nucleic acid scaffold modification
  source 1..16: mol_type = other RNA
gcctccggttctgaag

SEQ ID NO: 4915 - RNA, 16 nt, synthetic construct
  misc_feature 1..16: note = Antisense oligonucleotide
  modified_base 1: mod_base = OTHER; note = misc_feature - bicyclic nucleic acid scaffold modification
  modified_base 11: mod_base = OTHER; note = misc_feature - bicyclic nucleic acid scaffold modification
  modified_base 13: mod_base = OTHER; note = misc_feature - bicyclic nucleic acid scaffold modification
  modified_base 16: mod_base = OTHER; note = misc_feature - bicyclic nucleic acid scaffold modification
  source 1..16: mol_type = other RNA
gcctccggttctgaag

SEQ ID NO: 4916 - RNA, 16 nt, synthetic construct
  misc_feature 1..16: note = Antisense oligonucleotide
  modified_base 1..2: mod_base = OTHER; note = misc_feature - bicyclic nucleic acid scaffold modification
  modified_base 15..16: mod_base = OTHER; note = misc_feature - bicyclic nucleic acid scaffold modification
  source 1..16: mol_type = other RNA
gcctccggttctgaag

SEQ ID NO: 4917 - RNA, 16 nt, synthetic construct
  misc_feature 1..16: note = Antisense oligonucleotide
  modified_base 1..2: mod_base = OTHER; note = misc_feature - bicyclic nucleic acid scaffold modification
  modified_base 11: mod_base = OTHER; note = misc_feature - bicyclic nucleic acid scaffold modification
  modified_base 15..16: mod_base = OTHER; note = misc_feature - bicyclic nucleic acid scaffold modification
  source 1..16: mol_type = other RNA
gcctccggttctgaag

SEQ ID NO: 4918 - RNA, 16 nt, synthetic construct
  misc_feature 1..16: note = Antisense oligonucleotide
  modified_base 1..2: mod_base = OTHER; note = misc_feature - bicyclic nucleic acid scaffold modification
  modified_base 8: mod_base = OTHER; note = misc_feature - bicyclic nucleic acid scaffold modification
  modified_base 11: mod_base = OTHER; note = misc_feature - bicyclic nucleic acid scaffold modification
  modified_base 15..16: mod_base = OTHER; note = misc_feature - bicyclic nucleic acid scaffold modification
  source 1..16: mol_type = other RNA
gcctccggttctgaag

SEQ ID NO: 4919 - RNA, 16 nt, synthetic construct
  misc_feature 1..16: note = Antisense oligonucleotide
  modified_base 1: mod_base = OTHER; note = misc_feature - bicyclic nucleic acid scaffold modification
  modified_base 16: mod_base = OTHER; note = misc_feature - bicyclic nucleic acid scaffold modification
  source 1..16: mol_type = other RNA
cctccggttctgaagg

SEQ ID NO: 4920 - RNA, 16 nt, synthetic construct
  misc_feature 1..16: note = Antisense oligonucleotide
  modified_base 1: mod_base = OTHER; note = misc_feature - bicyclic nucleic acid scaffold modification
  modified_base 4: mod_base = OTHER; note = misc_feature - bicyclic nucleic acid scaffold modification
  modified_base 16: mod_base = OTHER; note = misc_feature - bicyclic nucleic acid scaffold modification
  source 1..16: mol_type = other RNA
cctccggttctgaagg

SEQ ID NO: 4921 - RNA, 16 nt, synthetic construct
  misc_feature 1..16: note = Antisense oligonucleotide
  modified_base 1: mod_base = OTHER; note = misc_feature - bicyclic nucleic acid scaffold modification
  modified_base 7: mod_base = OTHER; note = misc_feature - bicyclic nucleic acid scaffold modification
  modified_base 16: mod_base = OTHER; note = misc_feature - bicyclic nucleic acid scaffold modification
  source 1..16: mol_type = other RNA
cctccggttctgaagg

SEQ ID NO: 4922 - RNA, 16 nt, synthetic construct
  misc_feature 1..16: note = Antisense oligonucleotide
  modified_base 1: mod_base = OTHER; note = misc_feature - bicyclic nucleic acid scaffold modification
  modified_base 10: mod_base = OTHER; note = misc_feature - bicyclic nucleic acid scaffold modification
  modified_base 16: mod_base = OTHER; note = misc_feature - bicyclic nucleic acid scaffold modification
  source 1..16: mol_type = other RNA
cctccggttctgaagg

SEQ ID NO: 4923 - RNA, 16 nt, synthetic construct
  misc_feature 1..16: note = Antisense oligonucleotide
  modified_base 1: mod_base = OTHER; note = misc_feature - bicyclic nucleic acid scaffold modification
  modified_base 12: mod_base = OTHER; note = misc_feature - bicyclic nucleic acid scaffold modification
  modified_base 16: mod_base = OTHER; note = misc_feature - bicyclic nucleic acid scaffold modification
  source 1..16: mol_type = other RNA
cctccggttctgaagg

SEQ ID NO: 4924 - RNA, 16 nt, synthetic construct
  misc_feature 1..16: note = Antisense oligonucleotide
  modified_base 1: mod_base = OTHER; note = misc_feature - bicyclic nucleic acid scaffold modification
  modified_base 10: mod_base = OTHER; note = misc_feature - bicyclic nucleic acid scaffold modification
  modified_base 12: mod_base = OTHER; note = misc_feature - bicyclic nucleic acid scaffold modification
  modified_base 16: mod_base = OTHER; note = misc_feature - bicyclic nucleic acid scaffold modification
  source 1..16: mol_type = other RNA
cctccggttctgaagg

SEQ ID NO: 4925 - RNA, 16 nt, synthetic construct
  misc_feature 1..16: note = Antisense oligonucleotide
  modified_base 1: mod_base = OTHER; note = misc_feature - bicyclic nucleic acid scaffold modification
  modified_base 7: mod_base = OTHER; note = misc_feature - bicyclic nucleic acid scaffold modification
  modified_base 12: mod_base = OTHER; note = misc_feature - bicyclic nucleic acid scaffold modification
  modified_base 16: mod_base = OTHER; note = misc_feature - bicyclic nucleic acid scaffold modification
  source 1..16: mol_type = other RNA
cctccggttctgaagg

SEQ ID NO: 4926 - RNA, 16 nt, synthetic construct
  misc_feature 1..16: note = Antisense oligonucleotide
  modified_base 1: mod_base = OTHER; note = misc_feature - bicyclic nucleic acid scaffold modification
  modified_base 4: mod_base = OTHER; note = misc_feature - bicyclic nucleic acid scaffold modification
  modified_base 10: mod_base = OTHER; note = misc_feature - bicyclic nucleic acid scaffold modification
  modified_base 16: mod_base = OTHER; note = misc_feature - bicyclic nucleic acid scaffold modification
  source 1..16: mol_type = other RNA
cctccggttctgaagg

SEQ ID NO: 4927 - RNA, 16 nt, synthetic construct
  misc_feature 1..16: note = Antisense oligonucleotide
  modified_base 1..2: mod_base = OTHER; note = misc_feature - bicyclic nucleic acid scaffold modification
  modified_base 15..16: mod_base = OTHER; note = misc_feature - bicyclic nucleic acid scaffold modification
  source 1..16: mol_type = other RNA
cctccggttctgaagg

SEQ ID NO: 4928 - RNA, 16 nt, synthetic construct
  misc_feature 1..16: note = Antisense oligonucleotide
  modified_base 1..2: mod_base = OTHER; note = misc_feature - bicyclic nucleic acid scaffold modification
  modified_base 10: mod_base = OTHER; note = misc_feature - bicyclic nucleic acid scaffold modification
  modified_base 12: mod_base = OTHER; note = misc_feature - bicyclic nucleic acid scaffold modification
  modified_base 15..16: mod_base = OTHER; note = misc_feature - bicyclic nucleic acid scaffold modification
  source 1..16: mol_type = other RNA
cctccggttctgaagg

SEQ ID NO: 4929 - RNA, 16 nt, synthetic construct
  misc_feature 1..16: note = Antisense oligonucleotide
  modified_base 1..2: mod_base = OTHER; note = misc_feature - bicyclic nucleic acid scaffold modification
  modified_base 7: mod_base = OTHER; note = misc_feature - bicyclic nucleic acid scaffold modification
  modified_base 12: mod_base = OTHER; note = misc_feature - bicyclic nucleic acid scaffold modification
  modified_base 15..16: mod_base = OTHER; note = misc_feature - bicyclic nucleic acid scaffold modification
  source 1..16: mol_type = other RNA
cctccggttctgaagg

SEQ ID NO: 4930 - RNA, 16 nt, synthetic construct
  modified_base 16: mod_base = OTHER; note = thymine
  misc_feature 1..16: note = Antisense oligonucleotide
  modified_base 1: mod_base = OTHER; note = misc_feature - bicyclic nucleic acid scaffold modification
  modified_base 16: mod_base = OTHER; note = misc_feature - bicyclic nucleic acid scaffold modification
  source 1..16: mol_type = other RNA
ctccggttctgaaggt

SEQ ID NO: 4931 - RNA, 16 nt, synthetic construct
  modified_base 16: mod_base = OTHER; note = thymine
  misc_feature 1..16: note = Antisense oligonucleotide
  modified_base 1: mod_base = OTHER; note = misc_feature - bicyclic nucleic acid scaffold modification
  modified_base 3: mod_base = OTHER; note = misc_feature - bicyclic nucleic acid scaffold modification
  modified_base 16: mod_base = OTHER; note = misc_feature - bicyclic nucleic acid scaffold modification
  source 1..16: mol_type = other RNA
ctccggttctgaaggt

SEQ ID NO: 4932 - RNA, 16 nt, synthetic construct
  modified_base 16: mod_base = OTHER; note = thymine
  misc_feature 1..16: note = Antisense oligonucleotide
  modified_base 1: mod_base = OTHER; note = misc_feature - bicyclic nucleic acid scaffold modification
  modified_base 6: mod_base = OTHER; note = misc_feature - bicyclic nucleic acid scaffold modification
  modified_base 16: mod_base = OTHER; note = misc_feature - bicyclic nucleic acid scaffold modification
  source 1..16: mol_type = other RNA
ctccggttctgaaggt

SEQ ID NO: 4933 - RNA, 16 nt, synthetic construct
  modified_base 16: mod_base = OTHER; note = thymine
  misc_feature 1..16: note = Antisense oligonucleotide
  modified_base 1: mod_base = OTHER; note = misc_feature - bicyclic nucleic acid scaffold modification
  modified_base 9: mod_base = OTHER; note = misc_feature - bicyclic nucleic acid scaffold modification
  modified_base 16: mod_base = OTHER; note = misc_feature - bicyclic nucleic acid scaffold modification
  source 1..16: mol_type = other RNA
ctccggttctgaaggt

SEQ ID NO: 4934 - RNA, 16 nt, synthetic construct
  modified_base 16: mod_base = OTHER; note = thymine
  misc_feature 1..16: note = Antisense oligonucleotide
  modified_base 1: mod_base = OTHER; note = misc_feature - bicyclic nucleic acid scaffold modification
  modified_base 11: mod_base = OTHER; note = misc_feature - bicyclic nucleic acid scaffold modification
  modified_base 16: mod_base = OTHER; note = misc_feature - bicyclic nucleic acid scaffold modification
  source 1..16: mol_type = other RNA
ctccggttctgaaggt

SEQ ID NO: 4935 - RNA, 16 nt, synthetic construct
  modified_base 16: mod_base = OTHER; note = thymine
  misc_feature 1..16: note = Antisense oligonucleotide
  modified_base 1: mod_base = OTHER; note = misc_feature - bicyclic nucleic acid scaffold modification
  modified_base 14: mod_base = OTHER; note = misc_feature - bicyclic nucleic acid scaffold modification
  modified_base 16: mod_base = OTHER; note = misc_feature - bicyclic nucleic acid scaffold modification
  source 1..16: mol_type = other RNA
ctccggttctgaaggt

SEQ ID NO: 4936 - RNA, 16 nt, synthetic construct
  modified_base 16: mod_base = OTHER; note = thymine
  misc_feature 1..16: note = Antisense oligonucleotide
  modified_base 1: mod_base = OTHER; note = misc_feature - bicyclic nucleic acid scaffold modification
  modified_base 15..16: mod_base = OTHER; note = misc_feature - bicyclic nucleic acid scaffold modification
  source 1..16: mol_type = other RNA
ctccggttctgaaggt

SEQ ID NO: 4937 - RNA, 16 nt, synthetic construct
  modified_base 16: mod_base = OTHER; note = thymine
  misc_feature 1..16: note = Antisense oligonucleotide
  modified_base 1: mod_base = OTHER; note = misc_feature - bicyclic nucleic acid scaffold modification
  modified_base 11: mod_base = OTHER; note = misc_feature - bicyclic nucleic acid scaffold modification
  modified_base 15..16: mod_base = OTHER; note = misc_feature - bicyclic nucleic acid scaffold modification
  source 1..16: mol_type = other RNA
ctccggttctgaaggt

SEQ ID NO: 4938 - RNA, 16 nt, synthetic construct
  modified_base 16: mod_base = OTHER; note = thymine
  misc_feature 1..16: note = Antisense oligonucleotide
  modified_base 1: mod_base = OTHER; note = misc_feature - bicyclic nucleic acid scaffold modification
  modified_base 3: mod_base = OTHER; note = misc_feature - bicyclic nucleic acid scaffold modification
  modified_base 9: mod_base = OTHER; note = misc_feature - bicyclic nucleic acid scaffold modification
  modified_base 16: mod_base = OTHER; note = misc_feature - bicyclic nucleic acid scaffold modification
  source 1..16: mol_type = other RNA
ctccggttctgaaggt

SEQ ID NO: 4939 - RNA, 16 nt, synthetic construct
  modified_base 16: mod_base = OTHER; note = thymine
  misc_feature 1..16: note = Antisense oligonucleotide
  modified_base 1: mod_base = OTHER; note = misc_feature - bicyclic nucleic acid scaffold modification
  modified_base 6: mod_base = OTHER; note = misc_feature - bicyclic nucleic acid scaffold modification
  modified_base 11: mod_base = OTHER; note = misc_feature - bicyclic nucleic acid scaffold modification
  modified_base 16: mod_base = OTHER; note = misc_feature - bicyclic nucleic acid scaffold modification
  source 1..16: mol_type = other RNA
ctccggttctgaaggt

SEQ ID NO: 4940 - RNA, 16 nt, synthetic construct
  modified_base 2: mod_base = OTHER; note = thymine
  modified_base 16: mod_base = OTHER; note = thymine
  misc_feature 1..16: note = Antisense oligonucleotide
  modified_base 1..2: mod_base = OTHER; note = misc_feature - bicyclic nucleic acid scaffold modification
  modified_base 15..16: mod_base = OTHER; note = misc_feature - bicyclic nucleic acid scaffold modification
  source 1..16: mol_type = other RNA
ctccggttctgaaggt

SEQ ID NO: 4941 - RNA, 16 nt, synthetic construct
  modified_base 2: mod_base = OTHER; note = thymine
  modified_base 16: mod_base = OTHER; note = thymine
  misc_feature 1..16: note = Antisense oligonucleotide
  modified_base 1..2: mod_base = OTHER; note = misc_feature - bicyclic nucleic acid scaffold modification
  modified_base 9: mod_base = OTHER; note = misc_feature - bicyclic nucleic acid scaffold modification
  modified_base 15..16: mod_base = OTHER; note = misc_feature - bicyclic nucleic acid scaffold modification
  source 1..16: mol_type = other RNA
ctccggttctgaaggt

SEQ ID NO: 4942 - RNA, 16 nt, synthetic construct
  modified_base 2: mod_base = OTHER; note = thymine
  modified_base 16: mod_base = OTHER; note = thymine
  misc_feature 1..16: note = Antisense oligonucleotide
  modified_base 1..2: mod_base = OTHER; note = misc_feature - bicyclic nucleic acid scaffold modification
  modified_base 11: mod_base = OTHER; note = misc_feature - bicyclic nucleic acid scaffold modification
  modified_base 15..16: mod_base = OTHER; note = misc_feature - bicyclic nucleic acid scaffold modification
  source 1..16: mol_type = other RNA
ctccggttctgaaggt

SEQ ID NO: 4943 - RNA, 16 nt, synthetic construct
  modified_base 1: mod_base = OTHER; note = thymine
  misc_feature 1..16: note = Antisense oligonucleotide
  modified_base 1: mod_base = OTHER; note = misc_feature - bicyclic nucleic acid scaffold modification
  modified_base 16: mod_base = OTHER; note = misc_feature - bicyclic nucleic acid scaffold modification
  source 1..16: mol_type = other RNA
tccggttctgaaggtg

SEQ ID NO: 4944 - RNA, 16 nt, synthetic construct
  modified_base 1: mod_base = OTHER; note = thymine
  misc_feature 1..16: note = Antisense oligonucleotide
  modified_base 1: mod_base = OTHER; note = misc_feature - bicyclic nucleic acid scaffold modification
  modified_base 5: mod_base = OTHER; note = misc_feature - bicyclic nucleic acid scaffold modification
  modified_base 16: mod_base = OTHER; note = misc_feature - bicyclic nucleic acid scaffold modification
  source 1..16: mol_type = other RNA
tccggttctgaaggtg

SEQ ID NO: 4945 - RNA, 16 nt, synthetic construct
  modified_base 1: mod_base = OTHER; note = thymine
  misc_feature 1..16: note = Antisense oligonucleotide
  modified_base 1: mod_base = OTHER; note = misc_feature - bicyclic nucleic acid scaffold modification
  modified_base 8: mod_base = OTHER; note = misc_feature - bicyclic nucleic acid scaffold modification
  modified_base 16: mod_base = OTHER; note = misc_feature - bicyclic nucleic acid scaffold modification
  source 1..16: mol_type = other RNA
tccggttctgaaggtg

SEQ ID NO: 4946 - RNA, 16 nt, synthetic construct
  modified_base 1: mod_base = OTHER; note = thymine
  misc_feature 1..16: note = Antisense oligonucleotide
  modified_base 1: mod_base = OTHER; note = misc_feature - bicyclic nucleic acid scaffold modification
  modified_base 10: mod_base = OTHER; note = misc_feature - bicyclic nucleic acid scaffold modification
  modified_base 16: mod_base = OTHER; note = misc_feature - bicyclic nucleic acid scaffold modification
  source 1..16: mol_type = other RNA
tccggttctgaaggtg

SEQ ID NO: 4947 - RNA, 16 nt, synthetic construct
  modified_base 1: mod_base = OTHER; note = thymine
  misc_feature 1..16: note = Antisense oligonucleotide
  modified_base 1: mod_base = OTHER; note = misc_feature - bicyclic nucleic acid scaffold modification
  modified_base 13: mod_base = OTHER; note = misc_feature - bicyclic nucleic acid scaffold modification
  modified_base 16: mod_base = OTHER; note = misc_feature - bicyclic nucleic acid scaffold modification
  source 1..16: mol_type = other RNA
tccggttctgaaggtg

SEQ ID NO: 4948 - RNA, 16 nt, synthetic construct
  modified_base 1: mod_base = OTHER; note = thymine
  misc_feature 1..16: note = Antisense oligonucleotide
  modified_base 1: mod_base = OTHER; note = misc_feature - bicyclic nucleic acid scaffold modification
  modified_base 14: mod_base = OTHER; note = misc_feature - bicyclic nucleic acid scaffold modification
  modified_base 16: mod_base = OTHER; note = misc_feature - bicyclic nucleic acid scaffold modification
  source 1..16: mol_type = other RNA
tccggttctgaaggtg

SEQ ID NO: 4949 - RNA, 16 nt, synthetic construct
  modified_base 1: mod_base = OTHER; note = thymine
  misc_feature 1..16: note = Antisense oligonucleotide
  modified_base 1: mod_base = OTHER; note = misc_feature - bicyclic nucleic acid scaffold modification
  modified_base 8: mod_base = OTHER; note = misc_feature - bicyclic nucleic acid scaffold modification
  modified_base 10: mod_base = OTHER; note = misc_feature - bicyclic nucleic acid scaffold modification
  modified_base 16: mod_base = OTHER; note = misc_feature - bicyclic nucleic acid scaffold modification
  source 1..16: mol_type = other RNA
tccggttctgaaggtg

SEQ ID NO: 4950 - RNA, 16 nt, synthetic construct
  modified_base 1: mod_base = OTHER; note = thymine
  misc_feature 1..16: note = Antisense oligonucleotide
  modified_base 1: mod_base = OTHER; note = misc_feature - bicyclic nucleic acid scaffold modification
  modified_base 5: mod_base = OTHER; note = misc_feature - bicyclic nucleic acid scaffold modification
  modified_base 13: mod_base = OTHER; note = misc_feature - bicyclic nucleic acid scaffold modification
  modified_base 16: mod_base = OTHER; note = misc_feature - bicyclic nucleic acid scaffold modification
  source 1..16: mol_type = other RNA
tccggttctgaaggtg

SEQ ID NO: 4951 - RNA, 16 nt, synthetic construct
  modified_base 1: mod_base = OTHER; note = thymine
  modified_base 15: mod_base = OTHER; note = thymine
  misc_feature 1..16: note = Antisense oligonucleotide
  modified_base 1..2: mod_base = OTHER; note = misc_feature - bicyclic nucleic acid scaffold modification
  modified_base 15..16: mod_base = OTHER; note = misc_feature - bicyclic nucleic acid scaffold modification
  source 1..16: mol_type = other RNA
tccggttctgaaggtg

SEQ ID NO: 4952 - RNA, 16 nt, synthetic construct
  modified_base 1: mod_base = OTHER; note = thymine
  modified_base 15: mod_base = OTHER; note = thymine
  misc_feature 1..16: note = Antisense oligonucleotide
  modified_base 1..2: mod_base = OTHER; note = misc_feature - bicyclic nucleic acid scaffold modification
  modified_base 8: mod_base = OTHER; note = misc_feature - bicyclic nucleic acid scaffold modification
  modified_base 15..16: mod_base = OTHER; note = misc_feature - bicyclic nucleic acid scaffold modification
  source 1..16: mol_type = other RNA
tccggttctgaaggtg

SEQ ID NO: 4953 - RNA, 16 nt, synthetic construct
  modified_base 1: mod_base = OTHER; note = thymine
  modified_base 15: mod_base = OTHER; note = thymine
  misc_feature 1..16: note = Antisense oligonucleotide
  modified_base 1..2: mod_base = OTHER; note = misc_feature - bicyclic nucleic acid scaffold modification
  modified_base 8: mod_base = OTHER; note = misc_feature - bicyclic nucleic acid scaffold modification
  modified_base 10: mod_base = OTHER; note = misc_feature - bicyclic nucleic acid scaffold modification
  modified_base 15..16: mod_base = OTHER; note = misc_feature - bicyclic nucleic acid scaffold modification
  source 1..16: mol_type = other RNA
tccggttctgaaggtg

SEQ ID NO: 4954 - RNA, 16 nt, synthetic construct
  modified_base 16: mod_base = OTHER; note = thymine
  misc_feature 1..16: note = Antisense oligonucleotide
  modified_base 1: mod_base = OTHER; note = misc_feature - bicyclic nucleic acid scaffold modification
  modified_base 16: mod_base = OTHER; note = misc_feature - bicyclic nucleic acid scaffold modification
  source 1..16: mol_type = other RNA
ccggttctgaaggtgt

SEQ ID NO: 4955 - RNA, 16 nt, synthetic construct
  modified_base 16: mod_base = OTHER; note = thymine
  misc_feature 1..16: note = Antisense oligonucleotide
  modified_base 1: mod_base = OTHER; note = misc_feature - bicyclic nucleic acid scaffold modification
  modified_base 4: mod_base = OTHER; note = misc_feature - bicyclic nucleic acid scaffold modification
  modified_base 16: mod_base = OTHER; note = misc_feature - bicyclic nucleic acid scaffold modification
  source 1..16: mol_type = other RNA
ccggttctgaaggtgt

SEQ ID NO: 4956 - RNA, 16 nt, synthetic construct
  modified_base 16: mod_base = OTHER; note = thymine
  misc_feature 1..16: note = Antisense oligonucleotide
  modified_base 1: mod_base = OTHER; note = misc_feature - bicyclic nucleic acid scaffold modification
  modified_base 7: mod_base = OTHER; note = misc_feature - bicyclic nucleic acid scaffold modification
  modified_base 16: mod_base = OTHER; note = misc_feature - bicyclic nucleic acid scaffold modification
  source 1..16: mol_type = other RNA
ccggttctgaaggtgt

SEQ ID NO: 4957 - RNA, 16 nt, synthetic construct
  modified_base 16: mod_base = OTHER; note = thymine
  misc_feature 1..16: note = Antisense oligonucleotide
  modified_base 1: mod_base = OTHER; note = misc_feature - bicyclic nucleic acid scaffold modification
  modified_base 9: mod_base = OTHER; note = misc_feature - bicyclic nucleic acid scaffold modification
  modified_base 16: mod_base = OTHER; note = misc_feature - bicyclic nucleic acid scaffold modification
  source 1..16: mol_type = other RNA
ccggttctgaaggtgt

SEQ ID NO: 4958 - RNA, 16 nt, synthetic construct
  modified_base 16: mod_base = OTHER; note = thymine
  misc_feature 1..16: note = Antisense oligonucleotide
  modified_base 1: mod_base = OTHER; note = misc_feature - bicyclic nucleic acid scaffold modification
  modified_base 12: mod_base = OTHER; note = misc_feature - bicyclic nucleic acid scaffold modification
  modified_base 16: mod_base = OTHER; note = misc_feature - bicyclic nucleic acid scaffold modification
  source 1..16: mol_type = other RNA
ccggttctgaaggtgt

SEQ ID NO: 4959 - RNA, 16 nt, synthetic construct
  modified_base 16: mod_base = OTHER; note = thymine
  misc_feature 1..16: note = Antisense oligonucleotide
  modified_base 1: mod_base = OTHER; note = misc_feature - bicyclic nucleic acid scaffold modification
  modified_base 13: mod_base = OTHER; note = misc_feature - bicyclic nucleic acid scaffold modification
  modified_base 16: mod_base = OTHER; note = misc_feature - bicyclic nucleic acid scaffold modification
  source 1..16: mol_type = other RNA
ccggttctgaaggtgt

SEQ ID NO: 4960 - RNA, 16 nt, synthetic construct
  modified_base 16: mod_base = OTHER; note = thymine
  misc_feature 1..16: note = Antisense oligonucleotide
  modified_base 1: mod_base = OTHER; note = misc_feature - bicyclic nucleic acid scaffold modification
  modified_base 7: mod_base = OTHER; note = misc_feature - bicyclic nucleic acid scaffold modification
  modified_base 9: mod_base = OTHER; note = misc_feature - bicyclic nucleic acid scaffold modification
  modified_base 16: mod_base = OTHER; note = misc_feature - bicyclic nucleic acid scaffold modification
  source 1..16: mol_type = other RNA
ccggttctgaaggtgt

SEQ ID NO: 4961 - RNA, 16 nt, synthetic construct
  modified_base 16: mod_base = OTHER; note = thymine
  misc_feature 1..16: note = Antisense oligonucleotide
  modified_base 1: mod_base = OTHER; note = misc_feature - bicyclic nucleic acid scaffold modification
  modified_base 4: mod_base = OTHER; note = misc_feature - bicyclic nucleic acid scaffold modification
  modified_base 12: mod_base = OTHER; note = misc_feature - bicyclic nucleic acid scaffold modification
  modified_base 16: mod_base = OTHER; note = misc_feature - bicyclic nucleic acid scaffold modification
  source 1..16: mol_type = other RNA
ccggttctgaaggtgt

SEQ ID NO: 4962 - RNA, 16 nt, synthetic construct
  modified_base 16: mod_base = OTHER; note = thymine
  misc_feature 1..16: note = Antisense oligonucleotide
  modified_base 1..2: mod_base = OTHER; note = misc_feature - bicyclic nucleic acid scaffold modification
  modified_base 15..16: mod_base = OTHER; note = misc_feature - bicyclic nucleic acid scaffold modification
  source 1..16: mol_type = other RNA
ccggttctgaaggtgt

SEQ ID NO: 4963 - RNA, 16 nt, synthetic construct
  modified_base 16: mod_base = OTHER; note = thymine
  misc_feature 1..16: note = Antisense oligonucleotide
  modified_base 1..2: mod_base = OTHER; note = misc_feature - bicyclic nucleic acid scaffold modification
  modified_base 9: mod_base = OTHER; note = misc_feature - bicyclic nucleic acid scaffold modification
  modified_base 15..16: mod_base = OTHER; note = misc_feature - bicyclic nucleic acid scaffold modification
  source 1..16: mol_type = other RNA
ccggttctgaaggtgt

SEQ ID NO: 4964 - RNA, 16 nt, synthetic construct
  modified_base 16: mod_base = OTHER; note = thymine
  misc_feature 1..16: note = Antisense oligonucleotide
  modified_base 1..2: mod_base = OTHER; note = misc_feature - bicyclic nucleic acid scaffold modification
  modified_base 7: mod_base = OTHER; note = misc_feature - bicyclic nucleic acid scaffold modification
  modified_base 9: mod_base = OTHER; note = misc_feature - bicyclic nucleic acid scaffold modification
  modified_base 15..16: mod_base = OTHER; note = misc_feature - bicyclic nucleic acid scaffold modification
  source 1..16: mol_type = other RNA
ccggttctgaaggtgt

SEQ ID NO: 4965 - RNA, 16 nt, synthetic construct
  modified_base 16: mod_base = OTHER; note = thymine
  misc_feature 1..16: note = Antisense oligonucleotide
  modified_base 1: mod_base = OTHER; note = misc_feature - bicyclic nucleic acid scaffold modification
  modified_base 16: mod_base = OTHER; note = misc_feature - bicyclic nucleic acid scaffold modification
  source 1..16: mol_type = other RNA
cggttctgaaggtgtt

SEQ ID NO: 4966 - RNA, 16 nt, synthetic construct
  modified_base 16: mod_base = OTHER; note = thymine
  misc_feature 1..16: note = Antisense oligonucleotide
  modified_base 1: mod_base = OTHER; note = misc_feature - bicyclic nucleic acid scaffold modification
  modified_base 8: mod_base = OTHER; note = misc_feature - bicyclic nucleic acid scaffold modification
  modified_base 16: mod_base = OTHER; note = misc_feature - bicyclic nucleic acid scaffold modification
  source 1..16: mol_type = other RNA
cggttctgaaggtgtt

SEQ ID NO: 4967 - RNA, 16 nt, synthetic construct
  modified_base 16: mod_base = OTHER; note = thymine
  misc_feature 1..16: note = Antisense oligonucleotide
  modified_base 1: mod_base = OTHER; note = misc_feature - bicyclic nucleic acid scaffold modification
  modified_base 6: mod_base = OTHER; note = misc_feature - bicyclic nucleic acid scaffold modification
  modified_base 16: mod_base = OTHER; note = misc_feature - bicyclic nucleic acid scaffold modification
  source 1..16: mol_type = other RNA
cggttctgaaggtgtt

SEQ ID NO: 4968 - RNA, 16 nt, synthetic construct
  modified_base 16: mod_base = OTHER; note = thymine
  misc_feature 1..16: note = Antisense oligonucleotide
  modified_base 1: mod_base = OTHER; note = misc_feature - bicyclic nucleic acid scaffold modification
  modified_base 11: mod_base = OTHER; note = misc_feature - bicyclic nucleic acid scaffold modification
  modified_base 16: mod_base = OTHER; note = misc_feature - bicyclic nucleic acid scaffold modification
  source 1..16: mol_type = other RNA
cggttctgaaggtgtt

SEQ ID NO: 4969 - RNA, 16 nt, synthetic construct
  modified_base 16: mod_base = OTHER; note = thymine
  misc_feature 1..16: note = Antisense oligonucleotide
  modified_base 1: mod_base = OTHER; note = misc_feature - bicyclic nucleic acid scaffold modification
  modified_base 14: mod_base = OTHER; note = misc_feature - bicyclic nucleic acid scaffold modification
  modified_base 16: mod_base = OTHER; note = misc_feature - bicyclic nucleic acid scaffold modification
  source 1..16: mol_type = other RNA
cggttctgaaggtgtt

SEQ ID NO: 4970 - RNA, 16 nt, synthetic construct
  modified_base 16: mod_base = OTHER; note = thymine
  misc_feature 1..16: note = Antisense oligonucleotide
  modified_base 1: mod_base = OTHER; note = misc_feature - bicyclic nucleic acid scaffold modification
  modified_base 6: mod_base = OTHER; note = misc_feature - bicyclic nucleic acid scaffold modification
  modified_base 14: mod_base = OTHER; note = misc_feature - bicyclic nucleic acid scaffold modification
  modified_base 16: mod_base = OTHER; note = misc_feature - bicyclic nucleic acid scaffold modification
  source 1..16: mol_type = other RNA
cggttctgaaggtgtt

SEQ ID NO: 4971 - RNA, 16 nt, synthetic construct
  modified_base 16: mod_base = OTHER; note = thymine
  misc_feature 1..16: note = Antisense oligonucleotide
  modified_base 1: mod_base = OTHER; note = misc_feature - bicyclic nucleic acid scaffold modification
  modified_base 8: mod_base = OTHER; note = misc_feature - bicyclic nucleic acid scaffold modification
  modified_base 14: mod_base = OTHER; note = misc_feature - bicyclic nucleic acid scaffold modification
  modified_base 16: mod_base = OTHER; note = misc_feature - bicyclic nucleic acid scaffold modification
  source 1..16: mol_type = other RNA
cggttctgaaggtgtt

SEQ ID NO: 4972 - RNA, 16 nt, synthetic construct
  modified_base 16: mod_base = OTHER; note = thymine
  misc_feature 1..16: note = Antisense oligonucleotide
  modified_base 1: mod_base = OTHER; note = misc_feature - bicyclic nucleic acid scaffold modification
  modified_base 6: mod_base = OTHER; note = misc_feature - bicyclic nucleic acid scaffold modification
  modified_base 11: mod_base = OTHER; note = misc_feature - bicyclic nucleic acid scaffold modification
  modified_base 16: mod_base = OTHER; note = misc_feature - bicyclic nucleic acid scaffold modification
  source 1..16: mol_type = other RNA
cggttctgaaggtgtt

SEQ ID NO: 4973 - RNA, 16 nt, synthetic construct
  modified_base 15..16: mod_base = OTHER; note = thymine
  misc_feature 1..16: note = Antisense oligonucleotide
  modified_base 1..2: mod_base = OTHER; note = misc_feature - bicyclic nucleic acid scaffold modification
  modified_base 15..16: mod_base = OTHER; note = misc_feature - bicyclic nucleic acid scaffold modification
  source 1..16: mol_type = other RNA
cggttctgaaggtgtt

SEQ ID NO: 4974 - RNA, 16 nt, synthetic construct
  modified_base 15..16: mod_base = OTHER; note = thymine
  misc_feature 1..16: note = Antisense oligonucleotide
  modified_base 1..2: mod_base = OTHER; note = misc_feature - bicyclic nucleic acid scaffold modification
  modified_base 8: mod_base = OTHER; note = misc_feature - bicyclic nucleic acid scaffold modification
  modified_base 15..16: mod_base = OTHER; note = misc_feature - bicyclic nucleic acid scaffold modification
  source 1..16: mol_type = other RNA
cggttctgaaggtgtt

SEQ ID NO: 4975 - RNA, 16 nt, synthetic construct
  modified_base 15..16: mod_base = OTHER; note = thymine
  misc_feature 1..16: note = Antisense oligonucleotide
  modified_base 1..2: mod_base = OTHER; note = misc_feature - bicyclic nucleic acid scaffold modification
  modified_base 6: mod_base = OTHER; note = misc_feature - bicyclic nucleic acid scaffold modification
  modified_base 15..16: mod_base = OTHER; note = misc_feature - bicyclic nucleic acid scaffold modification
  source 1..16: mol_type = other RNA
cggttctgaaggtgtt

SEQ ID NO: 4976 - RNA, 16 nt, synthetic construct
  misc_feature 1..16: note = Antisense oligonucleotide
  modified_base 1: mod_base = OTHER; note = misc_feature - bicyclic nucleic acid scaffold modification
  modified_base 16: mod_base = OTHER; note = misc_feature - bicyclic nucleic acid scaffold modification
  source 1..16: mol_type = other RNA
ggttctgaaggtgttc

SEQ ID NO: 4977 - RNA, 16 nt, synthetic construct
  misc_feature 1..16: note = Antisense oligonucleotide
  modified_base 1: mod_base = OTHER; note = misc_feature - bicyclic nucleic acid scaffold modification
  modified_base 5: mod_base = OTHER; note = misc_feature - bicyclic nucleic acid scaffold modification
  modified_base 16: mod_base = OTHER; note = misc_feature - bicyclic nucleic acid scaffold modification
  source 1..16: mol_type = other RNA
ggttctgaaggtgttc

SEQ ID NO: 4978 - RNA, 16 nt, synthetic construct
  misc_feature 1..16: note = Antisense oligonucleotide
  modified_base 1: mod_base = OTHER; note = misc_feature - bicyclic nucleic acid scaffold modification
  modified_base 7: mod_base = OTHER; note = misc_feature - bicyclic nucleic acid scaffold modification
  modified_base 16: mod_base = OTHER; note = misc_feature - bicyclic nucleic acid scaffold modification
  source 1..16: mol_type = other RNA
ggttctgaaggtgttc

SEQ ID NO: 4979 - RNA, 16 nt, synthetic construct
  misc_feature 1..16: note = Antisense oligonucleotide
  modified_base 1: mod_base = OTHER; note = misc_feature - bicyclic nucleic acid scaffold modification
  modified_base 11: mod_base = OTHER; note = misc_feature - bicyclic nucleic acid scaffold modification
  modified_base 16: mod_base = OTHER; note = misc_feature - bicyclic nucleic acid scaffold modification
  source 1..16: mol_type = other RNA
ggttctgaaggtgttc

SEQ ID NO: 4980 - RNA, 16 nt, synthetic construct
  misc_feature 1..16: note = Antisense oligonucleotide
  modified_base 1: mod_base = OTHER; note = misc_feature - bicyclic nucleic acid scaffold modification
  modified_base 13: mod_base = OTHER; note = misc_feature - bicyclic nucleic acid scaffold modification
  modified_base 16: mod_base = OTHER; note = misc_feature - bicyclic nucleic acid scaffold modification
  source 1..16: mol_type = other RNA
ggttctgaaggtgttc

SEQ ID NO: 4981 - RNA, 16 nt, synthetic construct
  misc_feature 1..16: note = Antisense oligonucleotide
  modified_base 1: mod_base = OTHER; note = misc_feature - bicyclic nucleic acid scaffold modification
  modified_base 7: mod_base = OTHER; note = misc_feature - bicyclic nucleic acid scaffold modification
  modified_base 13: mod_base = OTHER; note = misc_feature - bicyclic nucleic acid scaffold modification
  modified_base 16: mod_base = OTHER; note = misc_feature - bicyclic nucleic acid scaffold modification
  source 1..16: mol_type = other RNA
ggttctgaaggtgttc

SEQ ID NO: 4982 - RNA, 16 nt, synthetic construct
  misc_feature 1..16: note = Antisense oligonucleotide
  modified_base 1: mod_base = OTHER; note = misc_feature - bicyclic nucleic acid scaffold modification
  modified_base 5: mod_base = OTHER; note = misc_feature - bicyclic nucleic acid scaffold modification
  modified_base 13: mod_base = OTHER; note = misc_feature - bicyclic nucleic acid scaffold modification
  modified_base 16: mod_base = OTHER; note = misc_feature - bicyclic nucleic acid scaffold modification
  source 1..16: mol_type = other RNA
ggttctgaaggtgttc

SEQ ID NO: 4983 - RNA, 16 nt, synthetic construct
  misc_feature 1..16: note = Antisense oligonucleotide
  modified_base 1: mod_base = OTHER; note = misc_feature - bicyclic nucleic acid scaffold modification
  modified_base 5: mod_base = OTHER; note = misc_feature - bicyclic nucleic acid scaffold modification
  modified_base 7: mod_base = OTHER; note = misc_feature - bicyclic nucleic acid scaffold modification
  modified_base 13: mod_base = OTHER; note = misc_feature - bicyclic nucleic acid scaffold modification
  modified_base 16: mod_base = OTHER; note = misc_feature - bicyclic nucleic acid scaffold modification
  source 1..16: mol_type = other RNA
ggttctgaaggtgttc

SEQ ID NO: 4984 - RNA, 16 nt, synthetic construct
  modified_base 15: mod_base = OTHER; note = thymine
  misc_feature 1..16: note = Antisense oligonucleotide
  modified_base 1..2: mod_base = OTHER; note = misc_feature - bicyclic nucleic acid scaffold modification
  modified_base 15..16: mod_base = OTHER; note = misc_feature - bicyclic nucleic acid scaffold modification
  source 1..16: mol_type = other RNA
ggttctgaaggtgttc

SEQ ID NO: 4985 - RNA, 16 nt, synthetic construct
  modified_base 15: mod_base = OTHER; note = thymine
  misc_feature 1..16: note = Antisense oligonucleotide
  modified_base 1..2: mod_base = OTHER; note = misc_feature - bicyclic nucleic acid scaffold modification
  modified_base 7: mod_base = OTHER; note = misc_feature - bicyclic nucleic acid scaffold modification
  modified_base 15..16: mod_base = OTHER; note = misc_feature - bicyclic nucleic acid scaffold modification
  source 1..16: mol_type = other RNA
ggttctgaaggtgttc

SEQ ID NO: 4986 - RNA, 16 nt, synthetic construct
  modified_base 15: mod_base = OTHER; note = thymine
  misc_feature 1..16: note = Antisense oligonucleotide
  modified_base 1..2: mod_base = OTHER; note = misc_feature - bicyclic nucleic acid scaffold modification
  modified_base 13: mod_base = OTHER; note = misc_feature - bicyclic nucleic acid scaffold modification
  modified_base 15..16: mod_base = OTHER; note = misc_feature - bicyclic nucleic acid scaffold modification
  source 1..16: mol_type = other RNA
ggttctgaaggtgttc

SEQ ID NO: 4987 - RNA, 22 nt, synthetic construct
  misc_feature 1..22: note = Antisense oligonucleotide
  modified_base 1: mod_base = OTHER; note = misc_feature - bicyclic nucleic acid scaffold modification
  modified_base 22: mod_base = OTHER; note = misc_feature - bicyclic nucleic acid scaffold modification
  source 1..22: mol_type = other RNA
cccactgattctgaattctttc

SEQ ID NO: 4988 - RNA, 22 nt, synthetic construct
  misc_feature 1..22: note = Antisense oligonucleotide
  modified_base 1: mod_base = OTHER; note = misc_feature - bicyclic nucleic acid scaffold modification
  modified_base 5: mod_base = OTHER; note = misc_feature - bicyclic nucleic acid scaffold modification
  modified_base 22: mod_base = OTHER; note = misc_feature - bicyclic nucleic acid scaffold modification
  source 1..22: mol_type = other RNA
cccactgattctgaattctttc

SEQ ID NO: 4989 - RNA, 22 nt, synthetic construct
  misc_feature 1..22: note = Antisense oligonucleotide
  modified_base 1: mod_base = OTHER; note = misc_feature - bicyclic nucleic acid scaffold modification
  modified_base 7: mod_base = OTHER; note = misc_feature - bicyclic nucleic acid scaffold modification
  modified_base 22: mod_base = OTHER; note = misc_feature - bicyclic nucleic acid scaffold modification
  source 1..22: mol_type = other RNA
cccactgattctgaattctttc

SEQ ID NO: 4990 - RNA, 22 nt, synthetic construct
  misc_feature 1..22: note = Antisense oligonucleotide
  modified_base 1: mod_base = OTHER; note = misc_feature - bicyclic nucleic acid scaffold modification
  modified_base 11: mod_base = OTHER; note = misc_feature - bicyclic nucleic acid scaffold modification
  modified_base 22: mod_base = OTHER; note = misc_feature - bicyclic nucleic acid scaffold modification
  source 1..22: mol_type = other RNA
cccactgattctgaattctttc

SEQ ID NO: 4991 - RNA, 22 nt, synthetic construct
  misc_feature 1..22: note = Antisense oligonucleotide
  modified_base 1: mod_base = OTHER; note = misc_feature - bicyclic nucleic acid scaffold modification
  modified_base 13: mod_base = OTHER; note = misc_feature - bicyclic nucleic acid scaffold modification
  modified_base 22: mod_base = OTHER; note = misc_feature - bicyclic nucleic acid scaffold modification
  source 1..22: mol_type = other RNA
cccactgattctgaattctttc

SEQ ID NO: 4992 - RNA, 22 nt, synthetic construct
  misc_feature 1..22: note = Antisense oligonucleotide
  modified_base 1: mod_base = OTHER; note = misc_feature - bicyclic nucleic acid scaffold modification
  modified_base 18: mod_base = OTHER; note = misc_feature - bicyclic nucleic acid scaffold modification
  modified_base 22: mod_base = OTHER; note = misc_feature - bicyclic nucleic acid scaffold modification
  source 1..22: mol_type = other RNA
cccactgattctgaattctttc

SEQ ID NO: 4993 - RNA, 22 nt, synthetic construct
  misc_feature 1..22: note = Antisense oligonucleotide
  modified_base 1: mod_base = OTHER; note = misc_feature - bicyclic nucleic acid scaffold modification
  modified_base 13: mod_base = OTHER; note = misc_feature - bicyclic nucleic acid scaffold modification
  modified_base 18: mod_base = OTHER; note = misc_feature - bicyclic nucleic acid scaffold modification
  modified_base 22: mod_base = OTHER; note = misc_feature - bicyclic nucleic acid scaffold modification
  source 1..22: mol_type = other RNA
cccactgattctgaattctttc

SEQ ID NO: 4994 - RNA, 22 nt, synthetic construct
  misc_feature 1..22: note = Antisense oligonucleotide
  modified_base 1: mod_base = OTHER; note = misc_feature - bicyclic nucleic acid scaffold modification
  modified_base 11: mod_base = OTHER; note = misc_feature - bicyclic nucleic acid scaffold modification
  modified_base 18: mod_base = OTHER; note = misc_feature - bicyclic nucleic acid scaffold modification
  modified_base 22: mod_base = OTHER; note = misc_feature - bicyclic nucleic acid scaffold modification
  source 1..22: mol_type = other RNA
cccactgattctgaattctttc

SEQ ID NO: 4995 - RNA, 22 nt, synthetic construct
  misc_feature 1..22: note = Antisense oligonucleotide
  modified_base 1: mod_base = OTHER; note = misc_feature - bicyclic nucleic acid scaffold modification
  modified_base 7: mod_base = OTHER; note = misc_feature - bicyclic nucleic acid scaffold modification
  modified_base 13: mod_base = OTHER; note = misc_feature - bicyclic nucleic acid scaffold modification
  modified_base 22: mod_base = OTHER; note = misc_feature - bicyclic nucleic acid scaffold modification
  source 1..22: mol_type = other RNA
cccactgattctgaattctttc

SEQ ID NO: 4996 - RNA, 22 nt, synthetic construct
  misc_feature 1..22: note = Antisense oligonucleotide
  modified_base 1: mod_base = OTHER; note = misc_feature - bicyclic nucleic acid scaffold modification
  modified_base 5: mod_base = OTHER; note = misc_feature - bicyclic nucleic acid scaffold modification
  modified_base 18: mod_base = OTHER; note = misc_feature - bicyclic nucleic acid scaffold modification
  modified_base 22: mod_base = OTHER; note = misc_feature - bicyclic nucleic acid scaffold modification
  source 1..22: mol_type = other RNA
cccactgattctgaattctttc

SEQ ID NO: 4997 - RNA, 22 nt, synthetic construct
  misc_feature 1..22: note = Antisense oligonucleotide
  modified_base 1: mod_base = OTHER; note = misc_feature - bicyclic nucleic acid scaffold modification
  modified_base 5: mod_base = OTHER; note = misc_feature - bicyclic nucleic acid scaffold modification
  modified_base 11: mod_base = OTHER; note = misc_feature - bicyclic nucleic acid scaffold modification
  modified_base 18: mod_base = OTHER; note = misc_feature - bicyclic nucleic acid scaffold modification
  modified_base 22: mod_base = OTHER; note = misc_feature - bicyclic nucleic acid scaffold modification
  source 1..22: mol_type = other RNA
cccactgattctgaattctttc

SEQ ID NO: 4998 - RNA, 22 nt, synthetic construct
  modified_base 21: mod_base = OTHER; note = thymine
  misc_feature 1..22: note = Antisense oligonucleotide
  modified_base 1..2: mod_base = OTHER; note = misc_feature - bicyclic nucleic acid scaffold modification
  modified_base 21..22: mod_base = OTHER; note = misc_feature - bicyclic nucleic acid scaffold modification
  source 1..22: mol_type = other RNA
cccactgattctgaattctttc

SEQ ID NO: 4999 - RNA, 22 nt, synthetic construct
  modified_base 21: mod_base = OTHER; note = thymine
  misc_feature 1..22: note = Antisense oligonucleotide
  modified_base 1..2: mod_base = OTHER; note = misc_feature - bicyclic nucleic acid scaffold modification
  modified_base 7: mod_base = OTHER; note = misc_feature - bicyclic nucleic acid scaffold modification
  modified_base 21..22: mod_base = OTHER; note = misc_feature - bicyclic nucleic acid scaffold modification
  source 1..22: mol_type = other RNA
cccactgattctgaattctttc

SEQ ID NO: 5000 - RNA, 22 nt, synthetic construct
  modified_base 21: mod_base = OTHER; note = thymine
  misc_feature 1..22: note = Antisense oligonucleotide
  modified_base 1..2: mod_base = OTHER; note = misc_feature - bicyclic nucleic acid scaffold modification
  modified_base 7: mod_base = OTHER; note = misc_feature - bicyclic nucleic acid scaffold modification
  modified_base 13: mod_base = OTHER; note = misc_feature - bicyclic nucleic acid scaffold modification
  modified_base 21..22: mod_base = OTHER; note = misc_feature - bicyclic nucleic acid scaffold modification
  source 1..22: mol_type = other RNA
cccactgattctgaattctttc

SEQ ID NO: 5001 - RNA, 22 nt, synthetic construct
  modified_base 21: mod_base = OTHER; note = thymine
  misc_feature 1..22: note = Antisense oligonucleotide
  modified_base 1..2: mod_base = OTHER; note = misc_feature - bicyclic nucleic acid scaffold modification
  modified_base 11: mod_base = OTHER; note = misc_feature - bicyclic nucleic acid scaffold modification
  modified_base 18: mod_base = OTHER; note = misc_feature - bicyclic nucleic acid scaffold modification
  modified_base 21..22: mod_base = OTHER; note = misc_feature - bicyclic nucleic acid scaffold modification
  source 1..22: mol_type = other RNA
cccactgattctgaattctttc

SEQ ID NO: 5002 - RNA, 22 nt, synthetic construct
  modified_base 21: mod_base = OTHER; note = thymine
  misc_feature 1..22: note = Antisense oligonucleotide
  modified_base 1..2: mod_base = OTHER; note = misc_feature - bicyclic nucleic acid scaffold modification
  modified_base 5: mod_base = OTHER; note = misc_feature - bicyclic nucleic acid scaffold modification
  modified_base 21..22: mod_base = OTHER; note = misc_feature - bicyclic nucleic acid scaffold modification
  source 1..22: mol_type = other RNA
cccactgattctgaattctttc

SEQ ID NO: 5003 - RNA, 20 nt, synthetic construct
  modified_base 20: mod_base = OTHER; note = thymine
  misc_feature 1..20: note = Antisense oligonucleotide
  modified_base 1: mod_base = OTHER; note = misc_feature - bicyclic nucleic acid scaffold modification
  modified_base 20: mod_base = OTHER; note = misc_feature - bicyclic nucleic acid scaffold modification
  source 1..20: mol_type = other RNA
cccactgattctgaattctt

SEQ ID NO: 5004 - RNA, 20 nt, synthetic construct
  modified_base 20: mod_base = OTHER; note = thymine
  misc_feature 1..20: note = Antisense oligonucleotide
  modified_base 1: mod_base = OTHER; note = misc_feature - bicyclic nucleic acid scaffold modification
  modified_base 5: mod_base = OTHER; note = misc_feature - bicyclic nucleic acid scaffold modification
  modified_base 20: mod_base = OTHER; note = misc_feature - bicyclic nucleic acid scaffold modification
  source 1..20: mol_type = other RNA
cccactgattctgaattctt

SEQ ID NO: 5005 - RNA, 20 nt, synthetic construct
  modified_base 20: mod_base = OTHER; note = thymine
  misc_feature 1..20: note = Antisense oligonucleotide
  modified_base 1: mod_base = OTHER; note = misc_feature - bicyclic nucleic acid scaffold modification
  modified_base 7: mod_base = OTHER; note = misc_feature - bicyclic nucleic acid scaffold modification
  modified_base 20: mod_base = OTHER; note = misc_feature - bicyclic nucleic acid scaffold modification
  source 1..20: mol_type = other RNA
cccactgattctgaattctt

SEQ ID NO: 5006 - RNA, 20 nt, synthetic construct
  modified_base 20: mod_base = OTHER; note = thymine
  misc_feature 1..20: note = Antisense oligonucleotide
  modified_base 1: mod_base = OTHER; note = misc_feature - bicyclic nucleic acid scaffold modification
  modified_base 11: mod_base = OTHER; note = misc_feature - bicyclic nucleic acid scaffold modification
  modified_base 20: mod_base = OTHER; note = misc_feature - bicyclic nucleic acid scaffold modification
  source 1..20: mol_type = other RNA
cccactgattctgaattctt

SEQ ID NO: 5007 - RNA, 20 nt, synthetic construct
  modified_base 20: mod_base = OTHER; note = thymine
  misc_feature 1..20: note = Antisense oligonucleotide
  modified_base 1: mod_base = OTHER; note = misc_feature - bicyclic nucleic acid scaffold modification
  modified_base 13: mod_base = OTHER; note = misc_feature - bicyclic nucleic acid scaffold modification
  modified_base 20: mod_base = OTHER; note = misc_feature - bicyclic nucleic acid scaffold modification
  source 1..20: mol_type = other RNA
cccactgattctgaattctt

SEQ ID NO: 5008 - RNA, 20 nt, synthetic construct
  modified_base 20: mod_base = OTHER; note = thymine
  misc_feature 1..20: note = Antisense oligonucleotide
  modified_base 1: mod_base = OTHER; note = misc_feature - bicyclic nucleic acid scaffold modification
  modified_base 18: mod_base = OTHER; note = misc_feature - bicyclic nucleic acid scaffold modification
  modified_base 20: mod_base = OTHER; note = misc_feature - bicyclic nucleic acid scaffold modification
  source 1..20: mol_type = other RNA
cccactgattctgaattctt

SEQ ID NO: 5009 - RNA, 20 nt, synthetic construct
  modified_base 20: mod_base = OTHER; note = thymine
  misc_feature 1..20: note = Antisense oligonucleotide
  modified_base 1: mod_base = OTHER; note = misc_feature - bicyclic nucleic acid scaffold modification
  modified_base 11: mod_base = OTHER; note = misc_feature - bicyclic nucleic acid scaffold modification
  modified_base 18: mod_base = OTHER; note = misc_feature - bicyclic nucleic acid scaffold modification
  modified_base 20: mod_base = OTHER; note = misc_feature - bicyclic nucleic acid scaffold modification
  source 1..20: mol_type = other RNA
cccactgattctgaattctt

SEQ ID NO: 5010 - RNA, 20 nt, synthetic construct
  modified_base 20: mod_base = OTHER; note = thymine
  misc_feature 1..20: note = Antisense oligonucleotide
  modified_base 1: mod_base = OTHER; note = misc_feature - bicyclic nucleic acid scaffold modification
  modified_base 7: mod_base = OTHER; note = misc_feature - bicyclic nucleic acid scaffold modification
  modified_base 13: mod_base = OTHER; note = misc_feature - bicyclic nucleic acid scaffold modification
  modified_base 20: mod_base = OTHER; note = misc_feature - bicyclic nucleic acid scaffold modification
  source 1..20: mol_type = other RNA
cccactgattctgaattctt

SEQ ID NO: 5011 - RNA, 20 nt, synthetic construct
  modified_base 20: mod_base = OTHER; note = thymine
  misc_feature 1..20: note = Antisense oligonucleotide
  modified_base 1: mod_base = OTHER; note = misc_feature - bicyclic nucleic acid scaffold modification
  modified_base 5: mod_base = OTHER; note = misc_feature - bicyclic nucleic acid scaffold modification
  modified_base 11: mod_base = OTHER; note = misc_feature - bicyclic nucleic acid scaffold modification
  modified_base 20: mod_base = OTHER; note = misc_feature - bicyclic nucleic acid scaffold modification
  source 1..20: mol_type = other RNA
cccactgattctgaattctt

SEQ ID NO: 5012 - RNA, 20 nt, synthetic construct
  modified_base 20: mod_base = OTHER; note = thymine
  misc_feature 1..20: note = Antisense oligonucleotide
  modified_base 1: mod_base = OTHER; note = misc_feature - bicyclic nucleic acid scaffold modification
  modified_base 5: mod_base = OTHER; note = misc_feature - bicyclic nucleic acid scaffold modification
  modified_base 18: mod_base = OTHER; note = misc_feature - bicyclic nucleic acid scaffold modification
  modified_base 20: mod_base = OTHER; note = misc_feature - bicyclic nucleic acid scaffold modification
  source 1..20: mol_type = other RNA
cccactgattctgaattctt

SEQ ID NO: 5013 - RNA, 20 nt, synthetic construct
  modified_base 19..20: mod_base = OTHER; note = thymine
  misc_feature 1..20: note = Antisense oligonucleotide
  modified_base 1..2: mod_base = OTHER; note = misc_feature - bicyclic nucleic acid scaffold modification
  modified_base 19..20: mod_base = OTHER; note = misc_feature - bicyclic nucleic acid scaffold modification
  source 1..20: mol_type = other RNA
cccactgattctgaattctt

SEQ ID NO: 5014 - RNA, 20 nt, synthetic construct
  modified_base 19..20: mod_base = OTHER; note = thymine
  misc_feature 1..20: note = Antisense oligonucleotide
  modified_base 1..2: mod_base = OTHER; note = misc_feature - bicyclic nucleic acid scaffold modification
  modified_base 7: mod_base = OTHER; note = misc_feature - bicyclic nucleic acid scaffold modification
  modified_base 19..20: mod_base = OTHER; note = misc_feature - bicyclic nucleic acid scaffold modification
  source 1..20: mol_type = other RNA
cccactgattctgaattctt

SEQ ID NO: 5015 - RNA, 20 nt, synthetic construct
  modified_base 19..20: mod_base = OTHER; note = thymine
  misc_feature 1..20: note = Antisense oligonucleotide
  modified_base 1: mod_base = OTHER; note = misc_feature - bicyclic nucleic acid scaffold modification
  modified_base 7: mod_base = OTHER; note = misc_feature - bicyclic nucleic acid scaffold modification
  modified_base 13: mod_base = OTHER; note = misc_feature - bicyclic nucleic acid scaffold modification
  modified_base 19..20: mod_base = OTHER; note = misc_feature - bicyclic nucleic acid scaffold modification
  source 1..20: mol_type = other RNA
cccactgattctgaattctt

SEQ ID NO: 5016 - RNA, 20 nt, synthetic construct
  modified_base 20: mod_base = OTHER; note = thymine
  misc_feature 1..20: note = Antisense oligonucleotide
  modified_base 1: mod_base = OTHER; note = misc_feature - bicyclic nucleic acid scaffold modification
  modified_base 20: mod_base = OTHER; note = misc_feature - bicyclic nucleic acid scaffold modification
  source 1..20: mol_type = other RNA
ccactgattctgaattcttt

SEQ ID NO: 5017 - RNA, 20 nt, synthetic construct
  modified_base 20: mod_base = OTHER; note = thymine
  misc_feature 1..20: note = Antisense oligonucleotide
  modified_base 1: mod_base = OTHER; note = misc_feature - bicyclic nucleic acid scaffold modification
  modified_base 4: mod_base = OTHER; note = misc_feature - bicyclic nucleic acid scaffold modification
  modified_base 20: mod_base = OTHER; note = misc_feature - bicyclic nucleic acid scaffold modification
  source 1..20: mol_type = other RNA
ccactgattctgaattcttt

SEQ ID NO: 5018 - RNA, 20 nt, synthetic construct
  modified_base 20: mod_base = OTHER; note = thymine
  misc_feature 1..20: note = Antisense oligonucleotide
  modified_base 1: mod_base = OTHER; note = misc_feature - bicyclic nucleic acid scaffold modification
  modified_base 6: mod_base = OTHER; note = misc_feature - bicyclic nucleic acid scaffold modification
  modified_base 20: mod_base = OTHER; note = misc_feature - bicyclic nucleic acid scaffold modification
  source 1..20: mol_type = other RNA
ccactgattctgaattcttt

SEQ ID NO: 5019 - RNA, 20 nt, synthetic construct
  modified_base 20: mod_base = OTHER; note = thymine
  misc_feature 1..20: note = Antisense oligonucleotide
  modified_base 1: mod_base = OTHER; note = misc_feature - bicyclic nucleic acid scaffold modification
  modified_base 10: mod_base = OTHER; note = misc_feature - bicyclic nucleic acid scaffold modification
  modified_base 20: mod_base = OTHER; note = misc_feature - bicyclic nucleic acid scaffold modification
  source 1..20: mol_type = other RNA
ccactgattctgaattcttt

SEQ ID NO: 5020 - RNA, 20 nt, synthetic construct
  modified_base 20: mod_base = OTHER; note = thymine
  misc_feature 1..20: note = Antisense oligonucleotide
  modified_base 1: mod_base = OTHER; note = misc_feature - bicyclic nucleic acid scaffold modification
  modified_base 12: mod_base = OTHER; note = misc_feature - bicyclic nucleic acid scaffold modification
  modified_base 20: mod_base = OTHER; note = misc_feature - bicyclic nucleic acid scaffold modification
  source 1..20: mol_type = other RNA
ccactgattctgaattcttt

SEQ ID NO: 5021 - RNA, 20 nt, synthetic construct
  modified_base 20: mod_base = OTHER; note = thymine
  misc_feature 1..20: note = Antisense oligonucleotide
  modified_base 1: mod_base = OTHER; note = misc_feature - bicyclic nucleic acid scaffold modification
  modified_base 17: mod_base = OTHER; note = misc_feature - bicyclic nucleic acid scaffold modification
  modified_base 20: mod_base = OTHER; note = misc_feature - bicyclic nucleic acid scaffold modification
  source 1..20: mol_type = other RNA
ccactgattctgaattcttt

SEQ ID NO: 5022 - RNA, 20 nt, synthetic construct
  modified_base 20: mod_base = OTHER; note = thymine
  misc_feature 1..20: note = Antisense oligonucleotide
  modified_base 1: mod_base = OTHER; note = misc_feature - bicyclic nucleic acid scaffold modification
  modified_base 10: mod_base = OTHER; note = misc_feature - bicyclic nucleic acid scaffold modification
  modified_base 17: mod_base = OTHER; note = misc_feature - bicyclic nucleic acid scaffold modification
  modified_base 20: mod_base = OTHER; note = misc_feature - bicyclic nucleic acid scaffold modification
  source 1..20: mol_type = other RNA
ccactgattctgaattcttt

SEQ ID NO: 5023 - RNA, 20 nt, synthetic construct
  modified_base 20: mod_base = OTHER; note = thymine
  misc_feature 1..20: note = Antisense oligonucleotide
  modified_base 1: mod_base = OTHER; note = misc_feature - bicyclic nucleic acid scaffold modification
  modified_base 4: mod_base = OTHER; note = misc_feature - bicyclic nucleic acid scaffold modification
  modified_base 17: mod_base = OTHER; note = misc_feature - bicyclic nucleic acid scaffold modification
  modified_base 20: mod_base = OTHER; note = misc_feature - bicyclic nucleic acid scaffold modification
  source 1..20: mol_type = other RNA
ccactgattctgaattcttt

SEQ ID NO: 5024 - RNA, 20 nt, synthetic construct
  modified_base 20: mod_base = OTHER; note = thymine
  misc_feature 1..20: note = Antisense oligonucleotide
  modified_base 1: mod_base = OTHER; note = misc_feature - bicyclic nucleic acid scaffold modification
  modified_base 4: mod_base = OTHER; note = misc_feature - bicyclic nucleic acid scaffold modification
  modified_base 10: mod_base = OTHER; note = misc_feature - bicyclic nucleic acid scaffold modification
  modified_base 20: mod_base = OTHER; note = misc_feature - bicyclic nucleic acid scaffold modification
  source 1..20: mol_type = other RNA
ccactgattctgaattcttt

SEQ ID NO: 5025 - RNA, 20 nt, synthetic construct
  modified_base 20: mod_base = OTHER; note = thymine
  misc_feature 1..20: note = Antisense oligonucleotide
  modified_base 1: mod_base = OTHER; note = misc_feature - bicyclic nucleic acid scaffold modification
  modified_base 6: mod_base = OTHER; note = misc_feature - bicyclic nucleic acid scaffold modification
  modified_base 12: mod_base = OTHER; note = misc_feature - bicyclic nucleic acid scaffold modification
  modified_base 20: mod_base = OTHER; note = misc_feature - bicyclic nucleic acid scaffold modification
  source 1..20: mol_type = other RNA
ccactgattctgaattcttt

SEQ ID NO: 5026 - RNA, 20 nt, synthetic construct
  modified_base 19..20: mod_base = OTHER; note = thymine
  misc_feature 1..20: note = Antisense oligonucleotide
  modified_base 1: mod_base = OTHER; note = misc_feature - bicyclic nucleic acid scaffold modification
  modified_base 6: mod_base = OTHER; note = misc_feature - bicyclic nucleic acid scaffold modification
  modified_base 10: mod_base = OTHER; note = misc_feature - bicyclic nucleic acid scaffold modification
  modified_base 19..20: mod_base = OTHER; note = misc_feature - bicyclic nucleic acid scaffold modification
  source 1..20: mol_type = other RNA
ccactgattctgaattcttt

SEQ ID NO: 5027 - RNA, 20 nt, synthetic construct
  modified_base 19..20: mod_base = OTHER; note = thymine
  misc_feature 1..20: note = Antisense oligonucleotide
  modified_base 1..2: mod_base = OTHER; note = misc_feature - bicyclic nucleic acid scaffold modification
  modified_base 19..20: mod_base = OTHER; note = misc_feature - bicyclic nucleic acid scaffold modification
  source 1..20: mol_type = other RNA
ccactgattctgaattcttt

SEQ ID NO: 5028 - RNA, 20 nt, synthetic construct
  modified_base 19..20: mod_base = OTHER; note = thymine
  misc_feature 1..20: note = Antisense oligonucleotide
  modified_base 1..2: mod_base = OTHER; note = misc_feature - bicyclic nucleic acid scaffold modification
  modified_base 6: mod_base = OTHER; note = misc_feature - bicyclic nucleic acid scaffold modification
  modified_base 12: mod_base = OTHER; note = misc_feature - bicyclic nucleic acid scaffold modification
  modified_base 19..20: mod_base = OTHER; note = misc_feature - bicyclic nucleic acid scaffold modification
  source 1..20: mol_type = other RNA
ccactgattctgaattcttt

SEQ ID NO: 5029 - RNA, 20 nt, synthetic construct
  modified_base 19..20: mod_base = OTHER; note = thymine
  misc_feature 1..20: note = Antisense oligonucleotide
  modified_base 1..2: mod_base = OTHER; note = misc_feature - bicyclic nucleic acid scaffold modification
  modified_base 10: mod_base = OTHER; note = misc_feature - bicyclic nucleic acid scaffold modification
  modified_base 19..20: mod_base = OTHER; note = misc_feature - bicyclic nucleic acid scaffold modification
  source 1..20: mol_type = other RNA
ccactgattctgaattcttt

SEQ ID NO: 5030 - RNA, 20 nt, synthetic construct
  modified_base 19..20: mod_base = OTHER; note = thymine
  misc_feature 1..20: note = Antisense oligonucleotide
  modified_base 1..2: mod_base = OTHER; note = misc_feature - bicyclic nucleic acid scaffold modification
  modified_base 10: mod_base = OTHER; note = misc_feature - bicyclic nucleic acid scaffold modification
  modified_base 17: mod_base = OTHER; note = misc_feature - bicyclic nucleic acid scaffold modification
  modified_base 19..20: mod_base = OTHER; note = misc_feature - bicyclic nucleic acid scaffold modification
  source 1..20: mol_type = other RNA
ccactgattctgaattcttt

SEQ ID NO: 5031 - RNA, 20 nt, synthetic construct
  misc_feature 1..20: note = Antisense oligonucleotide
  modified_base 1: mod_base = OTHER; note = misc_feature - bicyclic nucleic acid scaffold modification
  modified_base 20: mod_base = OTHER; note = misc_feature - bicyclic nucleic acid scaffold modification
  source 1..20: mol_type = other RNA
cactgattctgaattctttc

SEQ ID NO: 5032 - RNA, 20 nt, synthetic construct
  misc_feature 1..20: note = Antisense oligonucleotide
  modified_base 1: mod_base = OTHER; note = misc_feature - bicyclic nucleic acid scaffold modification
  modified_base 3: mod_base = OTHER; note = misc_feature - bicyclic nucleic acid scaffold modification
  modified_base 20: mod_base = OTHER; note = misc_feature - bicyclic nucleic acid scaffold modification
  source 1..20: mol_type = other RNA
cactgattctgaattctttc

SEQ ID NO: 5033 - RNA, 20 nt, synthetic construct
  misc_feature 1..20: note = Antisense oligonucleotide
  modified_base 1: mod_base = OTHER; note = misc_feature - bicyclic nucleic acid scaffold modification
  modified_base 5: mod_base = OTHER; note = misc_feature - bicyclic nucleic acid scaffold modification
  modified_base 20: mod_base = OTHER; note = misc_feature - bicyclic nucleic acid scaffold modification
  source 1..20: mol_type = other RNA
cactgattctgaattctttc

SEQ ID NO: 5034 - RNA, 20 nt, synthetic construct
  misc_feature 1..20: note = Antisense oligonucleotide
  modified_base 1: mod_base = OTHER; note = misc_feature - bicyclic nucleic acid scaffold modification
  modified_base 9: mod_base = OTHER; note = misc_feature - bicyclic nucleic acid scaffold modification
  modified_base 20: mod_base = OTHER; note = misc_feature - bicyclic nucleic acid scaffold modification
  source 1..20: mol_type = other RNA
cactgattctgaattctttc

SEQ ID NO: 5035 - RNA, 20 nt, synthetic construct
  misc_feature 1..20: note = Antisense oligonucleotide
  modified_base 1: mod_base = OTHER; note = misc_feature - bicyclic nucleic acid scaffold modification
  modified_base 11: mod_base = OTHER; note = misc_feature - bicyclic nucleic acid scaffold modification
  modified_base 20: mod_base = OTHER; note = misc_feature - bicyclic nucleic acid scaffold modification
  source 1..20: mol_type = other RNA
cactgattctgaattctttc

SEQ ID NO: 5036 - RNA, 20 nt, synthetic construct
  misc_feature 1..20: note = Antisense oligonucleotide
  modified_base 1: mod_base = OTHER; note = misc_feature - bicyclic nucleic acid scaffold modification
  modified_base 16: mod_base = OTHER; note = misc_feature - bicyclic nucleic acid scaffold modification
  modified_base 20: mod_base = OTHER; note = misc_feature - bicyclic nucleic acid scaffold modification
  source 1..20: mol_type = other RNA
cactgattctgaattctttc

SEQ ID NO: 5037 - RNA, 20 nt, synthetic construct
  misc_feature 1..20: note = Antisense oligonucleotide
  modified_base 1: mod_base = OTHER; note = misc_feature - bicyclic nucleic acid scaffold modification
  modified_base 9: mod_base = OTHER; note = misc_feature - bicyclic nucleic acid scaffold modification
  modified_base 16: mod_base = OTHER; note = misc_feature - bicyclic nucleic acid scaffold modification
  modified_base 20: mod_base = OTHER; note = misc_feature - bicyclic nucleic acid scaffold modification
  source 1..20: mol_type = other RNA
cactgattctgaattctttc

SEQ ID NO: 5038 - RNA, 20 nt, synthetic construct
  misc_feature 1..20: note = Antisense oligonucleotide
  modified_base 1: mod_base = OTHER; note = misc_feature - bicyclic nucleic acid scaffold modification
  modified_base 5: mod_base = OTHER; note = misc_feature - bicyclic nucleic acid scaffold modification
  modified_base 11: mod_base = OTHER; note = misc_feature - bicyclic nucleic acid scaffold modification
  modified_base 20: mod_base = OTHER; note = misc_feature - bicyclic nucleic acid scaffold modification
  source 1..20: mol_type = other RNA
cactgattctgaattctttc

SEQ ID NO: 5039 - RNA, 20 nt, synthetic construct
  misc_feature 1..20: note = Antisense oligonucleotide
  modified_base 1: mod_base = OTHER; note = misc_feature - bicyclic nucleic acid scaffold modification
  modified_base 3: mod_base = OTHER; note = misc_feature - bicyclic nucleic acid scaffold modification
  modified_base 9: mod_base = OTHER; note = misc_feature - bicyclic nucleic acid scaffold modification
  modified_base 20: mod_base = OTHER; note = misc_feature - bicyclic nucleic acid scaffold modification
  source 1..20: mol_type = other RNA
cactgattctgaattctttc

SEQ ID NO: 5040 - RNA, 20 nt, synthetic construct
  modified_base 19: mod_base = OTHER; note = thymine
  misc_feature 1..20: note = Antisense oligonucleotide
  modified_base 1..2: mod_base = OTHER; note = misc_feature - bicyclic nucleic acid scaffold modification
  modified_base 19..20: mod_base = OTHER; note = misc_feature - bicyclic nucleic acid scaffold modification
  source 1..20: mol_type = other RNA
cactgattctgaattctttc

SEQ ID NO: 5041 - RNA, 20 nt, synthetic construct
  modified_base 19: mod_base = OTHER; note = thymine
  misc_feature 1..20: note = Antisense oligonucleotide
  modified_base 1..2: mod_base = OTHER; note = misc_feature - bicyclic nucleic acid scaffold modification
  modified_base 11: mod_base = OTHER; note = misc_feature - bicyclic nucleic acid scaffold modification
  modified_base 19..20: mod_base = OTHER; note = misc_feature - bicyclic nucleic acid scaffold modification
  source 1..20: mol_type = other RNA
cactgattctgaattctttc

SEQ ID NO: 5042 - RNA, 20 nt, synthetic construct
  modified_base 19: mod_base = OTHER; note = thymine
  misc_feature 1..20: note = Antisense oligonucleotide
  modified_base 1..2: mod_base = OTHER; note = misc_feature - bicyclic nucleic acid scaffold modification
  modified_base 9: mod_base = OTHER; note = misc_feature - bicyclic nucleic acid scaffold modification
  modified_base 19..20: mod_base = OTHER; note = misc_feature - bicyclic nucleic acid scaffold modification
  source 1..20: mol_type = other RNA
cactgattctgaattctttc

SEQ ID NO: 5043 - RNA, 18 nt, synthetic construct
  misc_feature 1..18: note = Antisense oligonucleotide
  modified_base 1: mod_base = OTHER; note = misc_feature - bicyclic nucleic acid scaffold modification
  modified_base 18: mod_base = OTHER; note = misc_feature - bicyclic nucleic acid scaffold modification
  source 1..18: mol_type = other RNA
cccactgattctgaattc

SEQ ID NO: 5044 - RNA, 18 nt, synthetic construct
  misc_feature 1..18: note = Antisense oligonucleotide
  modified_base 1: mod_base = OTHER; note = misc_feature - bicyclic nucleic acid scaffold modification
  modified_base 5: mod_base = OTHER; note = misc_feature - bicyclic nucleic acid scaffold modification
  modified_base 18: mod_base = OTHER; note = misc_feature - bicyclic nucleic acid scaffold modification
  source 1..18: mol_type = other RNA
cccactgattctgaattc

SEQ ID NO: 5045 - RNA, 18 nt, synthetic construct
  misc_feature 1..18: note = Antisense oligonucleotide
  modified_base 1: mod_base = OTHER; note = misc_feature - bicyclic nucleic acid scaffold modification
  modified_base 7: mod_base = OTHER; note = misc_feature - bicyclic nucleic acid scaffold modification
  modified_base 18: mod_base = OTHER; note = misc_feature - bicyclic nucleic acid scaffold modification
  source 1..18: mol_type = other RNA
cccactgattctgaattc

SEQ ID NO: 5046 - RNA, 18 nt, synthetic construct
  misc_feature 1..18: note = Antisense oligonucleotide
  modified_base 1: mod_base = OTHER; note = misc_feature - bicyclic nucleic acid scaffold modification
  modified_base 11: mod_base = OTHER; note = misc_feature - bicyclic nucleic acid scaffold modification
  modified_base 18: mod_base = OTHER; note = misc_feature - bicyclic nucleic acid scaffold modification
  source 1..18: mol_type = other RNA
cccactgattctgaattc

SEQ ID NO: 5047 - RNA, 18 nt, synthetic construct
  misc_feature 1..18: note = Antisense oligonucleotide
  modified_base 1: mod_base = OTHER; note = misc_feature - bicyclic nucleic acid scaffold modification
  modified_base 13: mod_base = OTHER; note = misc_feature - bicyclic nucleic acid scaffold modification
  modified_base 18: mod_base = OTHER; note = misc_feature - bicyclic nucleic acid scaffold modification
  source 1..18: mol_type = other RNA
cccactgattctgaattc

SEQ ID NO: 5048 - RNA, 18 nt, synthetic construct
  misc_feature 1..18: note = Antisense oligonucleotide
  modified_base 1: mod_base = OTHER; note = misc_feature - bicyclic nucleic acid scaffold modification
  modified_base 7: mod_base = OTHER; note = misc_feature - bicyclic nucleic acid scaffold modification
  modified_base 13: mod_base = OTHER; note = misc_feature - bicyclic nucleic acid scaffold modification
  modified_base 18: mod_base = OTHER; note = misc_feature - bicyclic nucleic acid scaffold modification
  source 1..18: mol_type = other RNA
cccactgattctgaattc

SEQ ID NO: 5049 - RNA, 18 nt, synthetic construct
  misc_feature 1..18: note = Antisense oligonucleotide
  modified_base 1: mod_base = OTHER; note = misc_feature - bicyclic nucleic acid scaffold modification
  modified_base 5: mod_base = OTHER; note = misc_feature - bicyclic nucleic acid scaffold modification
  modified_base 11: mod_base = OTHER; note = misc_feature - bicyclic nucleic acid scaffold modification
  modified_base 18: mod_base = OTHER; note = misc_feature - bicyclic nucleic acid scaffold modification
  source 1..18: mol_type = other RNA
cccactgattctgaattc

SEQ ID NO: 5050 - RNA, 18 nt, synthetic construct
  misc_feature 1..18: note = Antisense oligonucleotide
  modified_base 1: mod_base = OTHER; note = misc_feature - bicyclic nucleic acid scaffold modification
  modified_base 5: mod_base = OTHER; note = misc_feature - bicyclic nucleic acid scaffold modification
  modified_base 13: mod_base = OTHER; note = misc_feature - bicyclic nucleic acid scaffold modification
  modified_base 18: mod_base = OTHER; note = misc_feature - bicyclic nucleic acid scaffold modification
  source 1..18: mol_type = other RNA
cccactgattctgaattc

SEQ ID NO: 5051 - RNA, 18 nt, synthetic construct
  modified_base 17: mod_base = OTHER; note = thymine
  misc_feature 1..18: note = Antisense oligonucleotide
  modified_base 1: mod_base = OTHER; note = misc_feature - bicyclic nucleic acid scaffold modification
  modified_base 17..18: mod_base = OTHER; note = misc_feature - bicyclic nucleic acid scaffold modification
  source 1..18: mol_type = other RNA
cccactgattctgaattc

SEQ ID NO: 5052 - RNA, 18 nt, synthetic construct
  modified_base 17: mod_base = OTHER; note = thymine
  misc_feature 1..18: note = Antisense oligonucleotide
  modified_base 1..2: mod_base = OTHER; note = misc_feature - bicyclic nucleic acid scaffold modification
  modified_base 17..18: mod_base = OTHER; note = misc_feature - bicyclic nucleic acid scaffold modification
  source 1..18: mol_type = other RNA
cccactgattctgaattc

SEQ ID NO: 5053 - RNA, 18 nt, synthetic construct
  modified_base 17: mod_base = OTHER; note = thymine
  misc_feature 1..18: note = Antisense oligonucleotide
  modified_base 1..2: mod_base = OTHER; note = misc_feature - bicyclic nucleic acid scaffold modification
  modified_base 7: mod_base = OTHER; note = misc_feature - bicyclic nucleic acid scaffold modification
  modified_base 11: mod_base = OTHER; note = misc_feature - bicyclic nucleic acid scaffold modification
  modified_base 17..18: mod_base = OTHER; note = misc_feature - bicyclic nucleic acid scaffold modification
  source 1..18: mol_type = other RNA
cccactgattctgaattc

SEQ ID NO: 5054 - RNA, 18 nt, synthetic construct
  modified_base 18: mod_base = OTHER; note = thymine
  misc_feature 1..18: note = Antisense oligonucleotide
  modified_base 1: mod_base = OTHER; note = misc_feature - bicyclic nucleic acid scaffold modification
  modified_base 18: mod_base = OTHER; note = misc_feature - bicyclic nucleic acid scaffold modification
  source 1..18: mol_type = other RNA
ccactgattctgaattct

SEQ ID NO: 5055 - RNA, 18 nt, synthetic construct
  modified_base 18: mod_base = OTHER; note = thymine
  misc_feature 1..18: note = Antisense oligonucleotide
  modified_base 1: mod_base = OTHER; note = misc_feature - bicyclic nucleic acid scaffold modification
  modified_base 17..18: mod_base = OTHER; note = misc_feature - bicyclic nucleic acid scaffold modification
  source 1..18: mol_type = other RNA
ccactgattctgaattct

SEQ ID NO: 5056 - RNA, 18 nt, synthetic construct
  modified_base 18: mod_base = OTHER; note = thymine
  misc_feature 1..18: note = Antisense oligonucleotide
  modified_base 1: mod_base = OTHER; note = misc_feature - bicyclic nucleic acid scaffold modification
  modified_base 12: mod_base = OTHER; note = misc_feature - bicyclic nucleic acid scaffold modification
  modified_base 18: mod_base = OTHER; note = misc_feature - bicyclic nucleic acid scaffold modification
  source 1..18: mol_type = other RNA
ccactgattctgaattct

SEQ ID NO: 5057 - RNA, 18 nt, synthetic construct
  modified_base 18: mod_base = OTHER; note = thymine
  misc_feature 1..18: note = Antisense oligonucleotide
  modified_base 1: mod_base = OTHER; note = misc_feature - bicyclic nucleic acid scaffold modification
  modified_base 10: mod_base = OTHER; note = misc_feature - bicyclic nucleic acid scaffold modification
  modified_base 18: mod_base = OTHER; note = misc_feature - bicyclic nucleic acid scaffold modification
  source 1..18: mol_type = other RNA
ccactgattctgaattct

SEQ ID NO: 5058 - RNA, 18 nt, synthetic construct
  modified_base 18: mod_base = OTHER; note = thymine
  misc_feature 1..18: note = Antisense oligonucleotide
  modified_base 1: mod_base = OTHER; note = misc_feature - bicyclic nucleic acid scaffold modification
  modified_base 6: mod_base = OTHER; note = misc_feature - bicyclic nucleic acid scaffold modification
  modified_base 18: mod_base = OTHER; note = misc_feature - bicyclic nucleic acid scaffold modification
  source 1..18: mol_type = other RNA
ccactgattctgaattct

SEQ ID NO: 5059 - RNA, 18 nt, synthetic construct
  modified_base 18: mod_base = OTHER; note = thymine
  misc_feature 1..18: note = Antisense oligonucleotide
  modified_base 1: mod_base = OTHER; note = misc_feature - bicyclic nucleic acid scaffold modification
  modified_base 4: mod_base = OTHER; note = misc_feature - bicyclic nucleic acid scaffold modification
  modified_base 18: mod_base = OTHER; note = misc_feature - bicyclic nucleic acid scaffold modification
  source 1..18: mol_type = other RNA
ccactgattctgaattct

SEQ ID NO: 5060 - RNA, 18 nt, synthetic construct
  modified_base 18: mod_base = OTHER; note = thymine
  misc_feature 1..18: note = Antisense oligonucleotide
  modified_base 1: mod_base = OTHER; note = misc_feature - bicyclic nucleic acid scaffold modification
  modified_base 4: mod_base = OTHER; note = misc_feature - bicyclic nucleic acid scaffold modification
  modified_base 10: mod_base = OTHER; note = misc_feature - bicyclic nucleic acid scaffold modification
  modified_base 18: mod_base = OTHER; note = misc_feature - bicyclic nucleic acid scaffold modification
  source 1..18: mol_type = other RNA
ccactgattctgaattct

SEQ ID NO: 5061 - RNA, 18 nt, synthetic construct
  modified_base 18: mod_base = OTHER; note = thymine
  misc_feature 1..18: note = Antisense oligonucleotide
  modified_base 1: mod_base = OTHER; note = misc_feature - bicyclic nucleic acid scaffold modification
  modified_base 6: mod_base = OTHER; note = misc_feature - bicyclic nucleic acid scaffold modification
  modified_base 12: mod_base = OTHER; note = misc_feature - bicyclic nucleic acid scaffold modification
  modified_base 18: mod_base = OTHER; note = misc_feature - bicyclic nucleic acid scaffold modification
  source 1..18: mol_type = other RNA
ccactgattctgaattct

SEQ ID NO: 5062 - RNA, 18 nt, synthetic construct
  modified_base 18: mod_base = OTHER; note = thymine
  misc_feature 1..18: note = Antisense oligonucleotide
  modified_base 1: mod_base = OTHER; note = misc_feature - bicyclic nucleic acid scaffold modification
  modified_base 6: mod_base = OTHER; note = misc_feature - bicyclic nucleic acid scaffold modification
  modified_base 12: mod_base = OTHER; note = misc_feature - bicyclic nucleic acid scaffold modification
  modified_base 17..18: mod_base = OTHER; note = misc_feature - bicyclic nucleic acid scaffold modification
  source 1..18: mol_type = other RNA
ccactgattctgaattct

SEQ ID NO: 5063 - RNA, 18 nt, synthetic construct
  modified_base 18: mod_base = OTHER; note = thymine
  misc_feature 1..18: note = Antisense oligonucleotide
  modified_base 1..2: mod_base = OTHER; note = misc_feature - bicyclic nucleic acid scaffold modification
  modified_base 17..18: mod_base = OTHER; note = misc_feature - bicyclic nucleic acid scaffold modification
  source 1..18: mol_type = other RNA
ccactgattctgaattct

SEQ ID NO: 5064 - RNA, 18 nt, synthetic construct
  modified_base 18: mod_base = OTHER; note = thymine
  misc_feature 1..18: note = Antisense oligonucleotide
  modified_base 1..2: mod_base = OTHER; note = misc_feature - bicyclic nucleic acid scaffold modification
  modified_base 6: mod_base = OTHER; note = misc_feature - bicyclic nucleic acid scaffold modification
  modified_base 12: mod_base = OTHER; note = misc_feature - bicyclic nucleic acid scaffold modification
  modified_base 17..18: mod_base = OTHER; note = misc_feature - bicyclic nucleic acid scaffold modification
  source 1..18: mol_type = other RNA
ccactgattctgaattct

SEQ ID NO: 5065 - RNA, 18 nt, synthetic construct
  modified_base 18: mod_base = OTHER; note = thymine
  misc_feature 1..18: note = Antisense oligonucleotide
  modified_base 1: mod_base = OTHER; note = misc_feature - bicyclic nucleic acid scaffold modification
  modified_base 18: mod_base = OTHER; note = misc_feature - bicyclic nucleic acid scaffold modification
  source 1..18: mol_type = other RNA
cactgattctgaattctt

SEQ ID NO: 5066 - RNA, 18 nt, synthetic construct
  modified_base 18: mod_base = OTHER; note = thymine
  misc_feature 1..18: note = Antisense oligonucleotide
  modified_base 1: mod_base = OTHER; note = misc_feature - bicyclic nucleic acid scaffold modification
  modified_base 16: mod_base = OTHER; note = misc_feature - bicyclic nucleic acid scaffold modification
  modified_base 18: mod_base = OTHER; note = misc_feature - bicyclic nucleic acid scaffold modification
  source 1..18: mol_type = other RNA
cactgattctgaattctt

SEQ ID NO: 5067 - RNA, 18 nt, synthetic construct
  modified_base 18: mod_base = OTHER; note = thymine
  misc_feature 1..18: note = Antisense oligonucleotide
  modified_base 1: mod_base = OTHER; note = misc_feature - bicyclic nucleic acid scaffold modification
  modified_base 11: mod_base = OTHER; note = misc_feature - bicyclic nucleic acid scaffold modification
  modified_base 18: mod_base = OTHER; note = misc_feature - bicyclic nucleic acid scaffold modification
  source 1..18: mol_type = other RNA
cactgattctgaattctt

SEQ ID NO: 5068 - RNA, 18 nt, synthetic construct
  modified_base 18: mod_base = OTHER; note = thymine
  misc_feature 1..18: note = Antisense oligonucleotide
  modified_base 1: mod_base = OTHER; note = misc_feature - bicyclic nucleic acid scaffold modification
  modified_base 9: mod_base = OTHER; note = misc_feature - bicyclic nucleic acid scaffold modification
  modified_base 18: mod_base = OTHER; note = misc_feature - bicyclic nucleic acid scaffold modification
  source 1..18: mol_type = other RNA
cactgattctgaattctt

SEQ ID NO: 5069 - RNA, 18 nt, synthetic construct
  modified_base 18: mod_base = OTHER; note = thymine
  misc_feature 1..18: note = Antisense oligonucleotide
  modified_base 1: mod_base = OTHER; note = misc_feature - bicyclic nucleic acid scaffold modification
  modified_base 5: mod_base = OTHER; note = misc_feature - bicyclic nucleic acid scaffold modification
  modified_base 18: mod_base = OTHER; note = misc_feature - bicyclic nucleic acid scaffold modification
  source 1..18: mol_type = other RNA
cactgattctgaattctt

SEQ ID NO: 5070 - RNA, 18 nt, synthetic construct
  modified_base 18: mod_base = OTHER; note = thymine
  misc_feature 1..18: note = Antisense oligonucleotide
  modified_base 1: mod_base = OTHER; note = misc_feature - bicyclic nucleic acid scaffold modification
  modified_base 3: mod_base = OTHER; note = misc_feature - bicyclic nucleic acid scaffold modification
  modified_base 18: mod_base = OTHER; note = misc_feature - bicyclic nucleic acid scaffold modification
  source 1..18: mol_type = other RNA
cactgattctgaattctt

SEQ ID NO: 5071 - RNA, 18 nt, synthetic construct
  modified_base 18: mod_base = OTHER; note = thymine
  misc_feature 1..18: note = Antisense oligonucleotide
  modified_base 1: mod_base = OTHER; note = misc_feature - bicyclic nucleic acid scaffold modification
  modified_base 3: mod_base = OTHER; note = misc_feature - bicyclic nucleic acid scaffold modification
  modified_base 9: mod_base = OTHER; note = misc_feature - bicyclic nucleic acid scaffold modification
  modified_base 18: mod_base = OTHER; note = misc_feature - bicyclic nucleic acid scaffold modification
  source 1..18: mol_type = other RNA
cactgattctgaattctt

SEQ ID NO: 5072 - RNA, 18 nt, synthetic construct
  modified_base 18: mod_base = OTHER; note = thymine
  misc_feature 1..18: note = Antisense oligonucleotide
  modified_base 1: mod_base = OTHER; note = misc_feature - bicyclic nucleic acid scaffold modification
  modified_base 9: mod_base = OTHER; note = misc_feature - bicyclic nucleic acid scaffold modification
  modified_base 16: mod_base = OTHER; note = misc_feature - bicyclic nucleic acid scaffold modification
  modified_base 18: mod_base = OTHER; note = misc_feature - bicyclic nucleic acid scaffold modification
  source 1..18: mol_type = other RNA
cactgattctgaattctt

SEQ ID NO: 5073 - RNA, 18 nt, synthetic construct
  modified_base 18: mod_base = OTHER; note = thymine
  misc_feature 1..18: note = Antisense oligonucleotide
  modified_base 1: mod_base = OTHER; note = misc_feature - bicyclic nucleic acid scaffold modification
  modified_base 5: mod_base = OTHER; note = misc_feature - bicyclic nucleic acid scaffold modification
  modified_base 11: mod_base = OTHER; note = misc_feature - bicyclic nucleic acid scaffold modification
  modified_base 18: mod_base = OTHER; note = misc_feature - bicyclic nucleic acid scaffold modification
  source 1..18: mol_type = other RNA
cactgattctgaattctt

SEQ ID NO: 5074 - RNA, 18 nt, synthetic construct
  modified_base 17..18: mod_base = OTHER; note = thymine
  misc_feature 1..18: note = Antisense oligonucleotide
  modified_base 1..2: mod_base = OTHER; note = misc_feature - bicyclic nucleic acid scaffold modification
  modified_base 17..18: mod_base = OTHER; note = misc_feature - bicyclic nucleic acid scaffold modification
  source 1..18: mol_type = other RNA
cactgattctgaattctt

SEQ ID NO: 5075 - RNA, 18 nt, synthetic construct
  modified_base 17..18: mod_base = OTHER; note = thymine
  misc_feature 1..18: note = Antisense oligonucleotide
  modified_base 1..2: mod_base = OTHER; note = misc_feature - bicyclic nucleic acid scaffold modification
  modified_base 9: mod_base = OTHER; note = misc_feature - bicyclic nucleic acid scaffold modification
  modified_base 11: mod_base = OTHER; note = misc_feature - bicyclic nucleic acid scaffold modification
  modified_base 17..18: mod_base = OTHER; note = misc_feature - bicyclic nucleic acid scaffold modification
  source 1..18: mol_type = other RNA
cactgattctgaattctt

SEQ ID NO: 5076 - RNA, 18 nt, synthetic construct
  modified_base 18: mod_base = OTHER; note = thymine
  misc_feature 1..18: note = Antisense oligonucleotide
  modified_base 1: mod_base = OTHER; note = misc_feature - bicyclic nucleic acid scaffold modification
  modified_base 18: mod_base = OTHER; note = misc_feature - bicyclic nucleic acid scaffold modification
  source 1..18: mol_type = other RNA
actgattctgaattcttt

SEQ ID NO: 5077 - RNA, 18 nt, synthetic construct
  modified_base 18: mod_base = OTHER; note = thymine
  misc_feature 1..18: note = Antisense oligonucleotide
  modified_base 1: mod_base = OTHER; note = misc_feature - bicyclic nucleic acid scaffold modification
  modified_base 4: mod_base = OTHER; note = misc_feature - bicyclic nucleic acid scaffold modification
  modified_base 18: mod_base = OTHER; note = misc_feature - bicyclic nucleic acid scaffold modification
  source 1..18: mol_type = other RNA
actgattctgaattcttt

SEQ ID NO: 5078 - RNA, 18 nt, synthetic construct
  modified_base 18: mod_base = OTHER; note = thymine
  misc_feature 1..18: note = Antisense oligonucleotide
  modified_base 1: mod_base = OTHER; note = misc_feature - bicyclic nucleic acid scaffold modification
  modified_base 8: mod_base = OTHER; note = misc_feature - bicyclic nucleic acid scaffold modification
  modified_base 18: mod_base = OTHER; note = misc_feature - bicyclic nucleic acid scaffold modification
  source 1..18: mol_type = other RNA
actgattctgaattcttt

SEQ ID NO: 5079 - RNA, 18 nt, synthetic construct
  modified_base 18: mod_base = OTHER; note = thymine
  misc_feature 1..18: note = Antisense oligonucleotide
  modified_base 1: mod_base = OTHER; note = misc_feature - bicyclic nucleic acid scaffold modification
  modified_base 10: mod_base = OTHER; note = misc_feature - bicyclic nucleic acid scaffold modification
  modified_base 18: mod_base = OTHER; note = misc_feature - bicyclic nucleic acid scaffold modification
  source 1..18: mol_type = other RNA
actgattctgaattcttt

SEQ ID NO: 5080 - RNA, 18 nt, synthetic construct
  modified_base 18: mod_base = OTHER; note = thymine
  misc_feature 1..18: note = Antisense oligonucleotide
  modified_base 1: mod_base = OTHER; note = misc_feature - bicyclic nucleic acid scaffold modification
  modified_base 15: mod_base = OTHER; note = misc_feature - bicyclic nucleic acid scaffold modification
  modified_base 18: mod_base = OTHER; note = misc_feature - bicyclic nucleic acid scaffold modification
  source 1..18: mol_type = other RNA
actgattctgaattcttt

SEQ ID NO: 5081 - RNA, 18 nt, synthetic construct
  modified_base 18: mod_base = OTHER; note = thymine
  misc_feature 1..18: note = Antisense oligonucleotide
  modified_base 1: mod_base = OTHER; note = misc_feature - bicyclic nucleic acid scaffold modification
  modified_base 8: mod_base = OTHER; note = misc_feature - bicyclic nucleic acid scaffold modification
  modified_base 15: mod_base = OTHER; note = misc_feature - bicyclic nucleic acid scaffold modification
  modified_base 18: mod_base = OTHER; note = misc_feature - bicyclic nucleic acid scaffold modification
  source 1..18: mol_type = other RNA
actgattctgaattcttt

SEQ ID NO: 5082 - RNA, 18 nt, synthetic construct
  modified_base 18: mod_base = OTHER; note = thymine
  misc_feature 1..18: note = Antisense oligonucleotide
  modified_base 1: mod_base = OTHER; note = misc_feature - bicyclic nucleic acid scaffold modification
  modified_base 4: mod_base = OTHER; note = misc_feature - bicyclic nucleic acid scaffold modification
  modified_base 10: mod_base = OTHER; note = misc_feature - bicyclic nucleic acid scaffold modification
  modified_base 18: mod_base = OTHER; note = misc_feature - bicyclic nucleic acid scaffold modification
  source 1..18: mol_type = other RNA
actgattctgaattcttt

SEQ ID NO: 5083 - RNA, 18 nt, synthetic construct
  modified_base 18: mod_base = OTHER; note = thymine
  misc_feature 1..18: note = Antisense oligonucleotide
  modified_base 1: mod_base = OTHER; note = misc_feature - bicyclic nucleic acid scaffold modification
  modified_base 4: mod_base = OTHER; note = misc_feature - bicyclic nucleic acid scaffold modification
  modified_base 15: mod_base = OTHER; note = misc_feature - bicyclic nucleic acid scaffold modification
  modified_base 18: mod_base = OTHER; note = misc_feature - bicyclic nucleic acid scaffold modification
  source 1..18: mol_type = other RNA
actgattctgaattcttt

SEQ ID NO: 5084 - RNA, 18 nt, synthetic construct
  modified_base 17..18: mod_base = OTHER; note = thymine
  misc_feature 1..18: note = Antisense oligonucleotide
  modified_base 1..2: mod_base = OTHER; note = misc_feature - bicyclic nucleic acid scaffold modification
  modified_base 17..18: mod_base = OTHER; note = misc_feature - bicyclic nucleic acid scaffold modification
  source 1..18: mol_type = other RNA
actgattctgaattcttt

SEQ ID NO: 5085 - RNA, 18 nt, synthetic construct
  modified_base 17..18: mod_base = OTHER; note = thymine
  misc_feature 1..18: note = Antisense oligonucleotide
  modified_base 1..2: mod_base = OTHER; note = misc_feature - bicyclic nucleic acid scaffold modification
  modified_base 10: mod_base = OTHER; note = misc_feature - bicyclic nucleic acid scaffold modification
  modified_base 17..18: mod_base = OTHER; note = misc_feature - bicyclic nucleic acid scaffold modification
  source 1..18: mol_type = other RNA
actgattctgaattcttt

SEQ ID NO: 5086 - RNA, 18 nt, synthetic construct
  modified_base 17..18: mod_base = OTHER; note = thymine
  misc_feature 1..18: note = Antisense oligonucleotide
  modified_base 1..2: mod_base = OTHER; note = misc_feature - bicyclic nucleic acid scaffold modification
  modified_base 4: mod_base = OTHER; note = misc_feature - bicyclic nucleic acid scaffold modification
  modified_base 10: mod_base = OTHER; note = misc_feature - bicyclic nucleic acid scaffold modification
  modified_base 17..18: mod_base = OTHER; note = misc_feature - bicyclic nucleic acid scaffold modification
  source 1..18: mol_type = other RNA
actgattctgaattcttt

SEQ ID NO: 5087 - RNA, 18 nt, synthetic construct
  misc_feature 1..18: note = Antisense oligonucleotide
  modified_base 1: mod_base = OTHER; note = misc_feature - bicyclic nucleic acid scaffold modification
  modified_base 18: mod_base = OTHER; note = misc_feature - bicyclic nucleic acid scaffold modification
  source 1..18: mol_type = other RNA
ctgattctgaattctttc

SEQ ID NO: 5088 - RNA, 18 nt, synthetic construct
  misc_feature 1..18: note = Antisense oligonucleotide
  modified_base 1: mod_base = OTHER; note = misc_feature - bicyclic nucleic acid scaffold modification
  modified_base 3: mod_base = OTHER; note = misc_feature - bicyclic nucleic acid scaffold modification
  modified_base 18: mod_base = OTHER; note = misc_feature - bicyclic nucleic acid scaffold modification
  source 1..18: mol_type = other RNA
ctgattctgaattctttc

SEQ ID NO: 5089 - RNA, 18 nt, synthetic construct
  misc_feature 1..18: note = Antisense oligonucleotide
  modified_base 1: mod_base = OTHER; note = misc_feature - bicyclic nucleic acid scaffold modification
  modified_base 7: mod_base = OTHER; note = misc_feature - bicyclic nucleic acid scaffold modification
  modified_base 18: mod_base = OTHER; note = misc_feature - bicyclic nucleic acid scaffold modification
  source 1..18: mol_type = other RNA
ctgattctgaattctttc

SEQ ID NO: 5090 - RNA, 18 nt, synthetic construct
  misc_feature 1..18: note = Antisense oligonucleotide
  modified_base 1: mod_base = OTHER; note = misc_feature - bicyclic nucleic acid scaffold modification
  modified_base 9: mod_base = OTHER; note = misc_feature - bicyclic nucleic acid scaffold modification
  modified_base 18: mod_base = OTHER; note = misc_feature - bicyclic nucleic acid scaffold modification
  source 1..18: mol_type = other RNA
ctgattctgaattctttc

SEQ ID NO: 5091 - RNA, 18 nt, synthetic construct
  misc_feature 1..18: note = Antisense oligonucleotide
  modified_base 1: mod_base = OTHER; note = misc_feature - bicyclic nucleic acid scaffold modification
  modified_base 14: mod_base = OTHER; note = misc_feature - bicyclic nucleic acid scaffold modification
  modified_base 18: mod_base = OTHER; note = misc_feature - bicyclic nucleic acid scaffold modification
  source 1..18: mol_type = other RNA
ctgattctgaattctttc

SEQ ID NO: 5092 - RNA, 18 nt, synthetic construct
  misc_feature 1..18: note = Antisense oligonucleotide
  modified_base 1: mod_base = OTHER; note = misc_feature - bicyclic nucleic acid scaffold modification
  modified_base 7: mod_base = OTHER; note = misc_feature - bicyclic nucleic acid scaffold modification
  modified_base 14: mod_base = OTHER; note = misc_feature - bicyclic nucleic acid scaffold modification
  modified_base 18: mod_base = OTHER; note = misc_feature - bicyclic nucleic acid scaffold modification
  source 1..18: mol_type = other RNA
ctgattctgaattctttc

SEQ ID NO: 5093 - RNA, 18 nt, synthetic construct
  misc_feature 1..18: note = Antisense oligonucleotide
  modified_base 1: mod_base = OTHER; note = misc_feature - bicyclic nucleic acid scaffold modification
  modified_base 3: mod_base = OTHER; note = misc_feature - bicyclic nucleic acid scaffold modification
  modified_base 9: mod_base = OTHER; note = misc_feature - bicyclic nucleic acid scaffold modification
  modified_base 18: mod_base = OTHER; note = misc_feature - bicyclic nucleic acid scaffold modification
  source 1..18: mol_type = other RNA
ctgattctgaattctttc

SEQ ID NO: 5094 - RNA, 18 nt, synthetic construct
  misc_feature 1..18: note = Antisense oligonucleotide
  modified_base 1: mod_base = OTHER; note = misc_feature - bicyclic nucleic acid scaffold modification
  modified_base 3: mod_base = OTHER; note = misc_feature - bicyclic nucleic acid scaffold modification
  modified_base 9: mod_base = OTHER; note = misc_feature - bicyclic nucleic acid scaffold modification
  modified_base 14: mod_base = OTHER; note = misc_feature - bicyclic nucleic acid scaffold modification
  modified_base 18: mod_base = OTHER; note = misc_feature - bicyclic nucleic acid scaffold modification
  source 1..18: mol_type = other RNA
ctgattctgaattctttc

SEQ ID NO: 5095 - RNA, 18 nt, synthetic construct
  modified_base 2: mod_base = OTHER; note = thymine
  modified_base 17: mod_base = OTHER; note = thymine
  misc_feature 1..18: note = Antisense oligonucleotide
  modified_base 1..2: mod_base = OTHER; note = misc_feature - bicyclic nucleic acid scaffold modification
  modified_base 17..18: mod_base = OTHER; note = misc_feature - bicyclic nucleic acid scaffold modification
  source 1..18: mol_type = other RNA
ctgattctgaattctttc

SEQ ID NO: 5096 - RNA, 18 nt, synthetic construct
  modified_base 2: mod_base = OTHER; note = thymine
  modified_base 17: mod_base = OTHER; note = thymine
  misc_feature 1..18: note = Antisense oligonucleotide
  modified_base 1..2: mod_base = OTHER; note = misc_feature - bicyclic nucleic acid scaffold modification
  modified_base 9: mod_base = OTHER; note = misc_feature - bicyclic nucleic acid scaffold modification
  modified_base 17..18: mod_base = OTHER; note = misc_feature - bicyclic nucleic acid scaffold modification
  source 1..18: mol_type = other RNA
ctgattctgaattctttc

SEQ ID NO: 5097 - RNA, 18 nt, synthetic construct
  modified_base 2: mod_base = OTHER; note = thymine
  modified_base 17: mod_base = OTHER; note = thymine
  misc_feature 1..18: note = Antisense oligonucleotide
  modified_base 1..2: mod_base = OTHER; note = misc_feature - bicyclic nucleic acid scaffold modification
  modified_base 7: mod_base = OTHER; note = misc_feature - bicyclic nucleic acid scaffold modification
  modified_base 14: mod_base = OTHER; note = misc_feature - bicyclic nucleic acid scaffold modification
  modified_base 17..18: mod_base = OTHER; note = misc_feature - bicyclic nucleic acid scaffold modification
  source 1..18: mol_type = other RNA
ctgattctgaattctttc

SEQ ID NO: 5098 - RNA, 16 nt, synthetic construct
  modified_base 16: mod_base = OTHER; note = thymine
  misc_feature 1..16: note = Antisense oligonucleotide
  modified_base 1: mod_base = OTHER; note = misc_feature - bicyclic nucleic acid scaffold modification
  modified_base 16: mod_base = OTHER; note = misc_feature - bicyclic nucleic acid scaffold modification
  source 1..16: mol_type = other RNA
cccactgattctgaat

SEQ ID NO: 5099 - RNA, 16 nt, synthetic construct
  modified_base 16: mod_base = OTHER; note = thymine
  misc_feature 1..16: note = Antisense oligonucleotide
  modified_base 1: mod_base = OTHER; note = misc_feature - bicyclic nucleic acid scaffold modification
  modified_base 5: mod_base = OTHER; note = misc_feature - bicyclic nucleic acid scaffold modification
  modified_base 16: mod_base = OTHER; note = misc_feature - bicyclic nucleic acid scaffold modification
  source 1..16: mol_type = other RNA
cccactgattctgaat

SEQ ID NO: 5100 - RNA, 16 nt, synthetic construct
  modified_base 16: mod_base = OTHER; note = thymine
  misc_feature 1..16: note = Antisense oligonucleotide
  modified_base 1: mod_base = OTHER; note = misc_feature - bicyclic nucleic acid scaffold modification
  modified_base 7: mod_base = OTHER; note = misc_feature - bicyclic nucleic acid scaffold modification
  modified_base 16: mod_base = OTHER; note = misc_feature - bicyclic nucleic acid scaffold modification
  source 1..16: mol_type = other RNA
cccactgattctgaat

SEQ ID NO: 5101 - RNA, 16 nt, synthetic construct
  modified_base 16: mod_base = OTHER; note = thymine
  misc_feature 1..16: note = Antisense oligonucleotide
  modified_base 1: mod_base = OTHER; note = misc_feature - bicyclic nucleic acid scaffold modification
  modified_base 11: mod_base = OTHER; note = misc_feature - bicyclic nucleic acid scaffold modification
  modified_base 16: mod_base = OTHER; note = misc_feature - bicyclic nucleic acid scaffold modification
  source 1..16: mol_type = other RNA
cccactgattctgaat

SEQ ID NO: 5102 - RNA, 16 nt, synthetic construct
  modified_base 16: mod_base = OTHER; note = thymine
  misc_feature 1..16: note = Antisense oligonucleotide
  modified_base 1: mod_base = OTHER; note = misc_feature - bicyclic nucleic acid scaffold modification
  modified_base 13: mod_base = OTHER; note = misc_feature - bicyclic nucleic acid scaffold modification
  modified_base 16: mod_base = OTHER; note = misc_feature - bicyclic nucleic acid scaffold modification
  source 1..16: mol_type = other RNA
cccactgattctgaat

SEQ ID NO: 5103 - RNA, 16 nt, synthetic construct
  modified_base 16: mod_base = OTHER; note = thymine
  misc_feature 1..16: note = Antisense oligonucleotide
  modified_base 1: mod_base = OTHER; note = misc_feature - bicyclic nucleic acid scaffold modification
  modified_base 7: mod_base = OTHER; note = misc_feature - bicyclic nucleic acid scaffold modification
  modified_base 13: mod_base = OTHER; note = misc_feature - bicyclic nucleic acid scaffold modification
  modified_base 16: mod_base = OTHER; note = misc_feature - bicyclic nucleic acid scaffold modification
  source 1..16: mol_type = other RNA
cccactgattctgaat

SEQ ID NO: 5104 - RNA, 16 nt, synthetic construct
  modified_base 16: mod_base = OTHER; note = thymine
  misc_feature 1..16: note = Antisense oligonucleotide
  modified_base 1: mod_base = OTHER; note = misc_feature - bicyclic nucleic acid scaffold modification
  modified_base 5: mod_base = OTHER; note = misc_feature - bicyclic nucleic acid scaffold modification
  modified_base 11: mod_base = OTHER; note = misc_feature - bicyclic nucleic acid scaffold modification
  modified_base 16: mod_base = OTHER; note = misc_feature - bicyclic nucleic acid scaffold modification
  source 1..16: mol_type = other RNA
cccactgattctgaat

SEQ ID NO: 5105 - RNA, 16 nt, synthetic construct
  modified_base 16: mod_base = OTHER; note = thymine
  misc_feature 1..16: note = Antisense oligonucleotide
  modified_base 1: mod_base = OTHER; note = misc_feature - bicyclic nucleic acid scaffold modification
  modified_base 15..16: mod_base = OTHER; note = misc_feature - bicyclic nucleic acid scaffold modification
  source 1..16: mol_type = other RNA
cccactgattctgaat

SEQ ID NO: 5106 - RNA, 16 nt, synthetic construct
  modified_base 16: mod_base = OTHER; note = thymine
  misc_feature 1..16: note = Antisense oligonucleotide
  modified_base 1..2: mod_base = OTHER; note = misc_feature - bicyclic nucleic acid scaffold modification
  modified_base 15..16: mod_base = OTHER; note = misc_feature - bicyclic nucleic acid scaffold modification
  source 1..16: mol_type = other RNA
cccactgattctgaat

SEQ ID NO: 5107 - RNA, 16 nt, synthetic construct
  modified_base 16: mod_base = OTHER; note = thymine
  misc_feature 1..16: note = Antisense oligonucleotide
  modified_base 1..2: mod_base = OTHER; note = misc_feature - bicyclic nucleic acid scaffold modification
  modified_base 7: mod_base = OTHER; note = misc_feature - bicyclic nucleic acid scaffold modification
  modified_base 15..16: mod_base = OTHER; note = misc_feature - bicyclic nucleic acid scaffold modification
  source 1..16: mol_type = other RNA
cccactgattctgaat

SEQ ID NO: 5108 - RNA, 16 nt, synthetic construct
  modified_base 16: mod_base = OTHER; note = thymine
  misc_feature 1..16: note = Antisense oligonucleotide
  modified_base 1..2: mod_base = OTHER; note = misc_feature - bicyclic nucleic acid scaffold modification
  modified_base 7: mod_base = OTHER; note = misc_feature - bicyclic nucleic acid scaffold modification
  modified_base 11: mod_base = OTHER; note = misc_feature - bicyclic nucleic acid scaffold modification
  modified_base 15..16: mod_base = OTHER; note = misc_feature - bicyclic nucleic acid scaffold modification
  source 1..16: mol_type = other RNA
cccactgattctgaat

SEQ ID NO: 5109 - RNA, 16 nt, synthetic construct
  modified_base 16: mod_base = OTHER; note = thymine
  misc_feature 1..16: note = Antisense oligonucleotide
  modified_base 1: mod_base = OTHER; note = misc_feature - bicyclic nucleic acid scaffold modification
  modified_base 16: mod_base = OTHER; note = misc_feature - bicyclic nucleic acid scaffold modification
  source 1..16: mol_type = other RNA
ccactgattctgaatt

SEQ ID NO: 5110 - RNA, 16 nt, synthetic construct
  modified_base 16: mod_base = OTHER; note = thymine
  misc_feature 1..16: note = Antisense oligonucleotide
  modified_base 1: mod_base = OTHER; note = misc_feature - bicyclic nucleic acid scaffold modification
  modified_base 4: mod_base = OTHER; note = misc_feature - bicyclic nucleic acid scaffold modification
  modified_base 16: mod_base = OTHER; note = misc_feature - bicyclic nucleic acid scaffold modification
  source 1..16: mol_type = other RNA
ccactgattctgaatt

SEQ ID NO: 5111 - RNA, 16 nt, synthetic construct
  modified_base 16: mod_base = OTHER; note = thymine
  misc_feature 1..16: note = Antisense oligonucleotide
  modified_base 1: mod_base = OTHER; note = misc_feature - bicyclic nucleic acid scaffold modification
  modified_base 6: mod_base = OTHER; note = misc_feature - bicyclic nucleic acid scaffold modification
  modified_base 16: mod_base = OTHER; note = misc_feature - bicyclic nucleic acid scaffold modification
  source 1..16: mol_type = other RNA
ccactgattctgaatt

SEQ ID NO: 5112 - RNA, 16 nt, synthetic construct
  modified_base 16: mod_base = OTHER; note = thymine
  misc_feature 1..16: note = Antisense oligonucleotide
  modified_base 1: mod_base = OTHER; note = misc_feature - bicyclic nucleic acid scaffold modification
  modified_base 10: mod_base = OTHER; note = misc_feature - bicyclic nucleic acid scaffold modification
  modified_base 16: mod_base = OTHER; note = misc_feature - bicyclic nucleic acid scaffold modification
  source 1..16: mol_type = other RNA
ccactgattctgaatt

SEQ ID NO: 5113 - RNA, 16 nt, synthetic construct
  modified_base 16: mod_base = OTHER; note = thymine
  misc_feature 1..16: note = Antisense oligonucleotide
  modified_base 1: mod_base = OTHER; note = misc_feature - bicyclic nucleic acid scaffold modification
  modified_base 12: mod_base = OTHER; note = misc_feature - bicyclic nucleic acid scaffold modification
  modified_base 16: mod_base = OTHER; note = misc_feature - bicyclic nucleic acid scaffold modification
  source 1..16: mol_type = other RNA
ccactgattctgaatt

SEQ ID NO: 5114 - RNA, 16 nt, synthetic construct
  modified_base 16: mod_base = OTHER; note = thymine
  misc_feature 1..16: note = Antisense oligonucleotide
  modified_base 1: mod_base = OTHER; note = misc_feature - bicyclic nucleic acid scaffold modification
  modified_base 6: mod_base = OTHER; note = misc_feature - bicyclic nucleic acid scaffold modification
  modified_base 12: mod_base = OTHER; note = misc_feature - bicyclic nucleic acid scaffold modification
  modified_base 16: mod_base = OTHER; note = misc_feature - bicyclic nucleic acid scaffold modification
  source 1..16: mol_type = other RNA
ccactgattctgaatt

SEQ ID NO: 5115 - RNA, 16 nt, synthetic construct
  modified_base 16: mod_base = OTHER; note = thymine
  misc_feature 1..16: note = Antisense oligonucleotide
  modified_base 1: mod_base = OTHER; note = misc_feature - bicyclic nucleic acid scaffold modification
  modified_base 4: mod_base = OTHER; note = misc_feature - bicyclic nucleic acid scaffold modification
  modified_base 10: mod_base = OTHER; note = misc_feature - bicyclic nucleic acid scaffold modification
  modified_base 16: mod_base = OTHER; note = misc_feature - bicyclic nucleic acid scaffold modification
  source 1..16: mol_type = other RNA
ccactgattctgaatt

SEQ ID NO: 5116 - RNA, 16 nt, synthetic construct
  modified_base 15..16: mod_base = OTHER; note = thymine
  misc_feature 1..16: note = Antisense oligonucleotide
  modified_base 1: mod_base = OTHER; note = misc_feature - bicyclic nucleic acid scaffold modification
  modified_base 15..16: mod_base = OTHER; note = misc_feature - bicyclic nucleic acid scaffold modification
  source 1..16: mol_type = other RNA
ccactgattctgaatt

SEQ ID NO: 5117 - RNA, 16 nt, synthetic construct
  modified_base 15..16: mod_base = OTHER; note = thymine
  misc_feature 1..16: note = Antisense oligonucleotide
  modified_base 1..2: mod_base = OTHER; note = misc_feature - bicyclic nucleic acid scaffold modification
  modified_base 15..16: mod_base = OTHER; note = misc_feature - bicyclic nucleic acid scaffold modification
  source 1..16: mol_type = other RNA
ccactgattctgaatt

SEQ ID NO: 5118 - RNA, 16 nt, synthetic construct
  modified_base 15..16: mod_base = OTHER; note = thymine
  misc_feature 1..16: note = Antisense oligonucleotide
  modified_base 1..2: mod_base = OTHER; note = misc_feature - bicyclic nucleic acid scaffold modification
  modified_base 12: mod_base = OTHER; note = misc_feature - bicyclic nucleic acid scaffold modification
  modified_base 15..16: mod_base = OTHER; note = misc_feature - bicyclic nucleic acid scaffold modification
  source 1..16: mol_type = other RNA
ccactgattctgaatt

SEQ ID NO: 5119 - RNA, 16 nt, synthetic construct
  modified_base 15..16: mod_base = OTHER; note = thymine
  misc_feature 1..16: note = Antisense oligonucleotide
  modified_base 1: mod_base = OTHER; note = misc_feature - bicyclic nucleic acid scaffold modification
  modified_base 4: mod_base = OTHER; note = misc_feature - bicyclic nucleic acid scaffold modification
  modified_base 6: mod_base = OTHER; note = misc_feature - bicyclic nucleic acid scaffold modification
  modified_base 10: mod_base = OTHER; note = misc_feature - bicyclic nucleic acid scaffold modification
  modified_base 15..16: mod_base = OTHER; note = misc_feature - bicyclic nucleic acid scaffold modification
  source 1..16: mol_type = other RNA
ccactgattctgaatt

SEQ ID NO: 5120 - RNA, 16 nt, synthetic construct
  misc_feature 1..16: note = Antisense oligonucleotide
  modified_base 1: mod_base = OTHER; note = misc_feature - bicyclic nucleic acid scaffold modification
  modified_base 16: mod_base = OTHER; note = misc_feature - bicyclic nucleic acid scaffold modification
  source 1..16: mol_type = other RNA
cactgattctgaattc

SEQ ID NO: 5121 - RNA, 16 nt, synthetic construct
  misc_feature 1..16: note = Antisense oligonucleotide
  modified_base 1: mod_base = OTHER; note = misc_feature - bicyclic nucleic acid scaffold modification
  modified_base 3: mod_base = OTHER; note = misc_feature - bicyclic nucleic acid scaffold modification
  modified_base 16: mod_base = OTHER; note = misc_feature - bicyclic nucleic acid scaffold modification
  source 1..16: mol_type = other RNA
cactgattctgaattc

SEQ ID NO: 5122 - RNA, 16 nt, synthetic construct
  misc_feature 1..16: note = Antisense oligonucleotide
  modified_base 1: mod_base = OTHER; note = misc_feature - bicyclic nucleic acid scaffold modification
  modified_base 5: mod_base = OTHER; note = misc_feature - bicyclic nucleic acid scaffold modification
  modified_base 16: mod_base = OTHER; note = misc_feature - bicyclic nucleic acid scaffold modification
  source 1..16: mol_type = other RNA
cactgattctgaattc

SEQ ID NO: 5123 - RNA, 16 nt, synthetic construct
  misc_feature 1..16: note = Antisense oligonucleotide
  modified_base 1: mod_base = OTHER; note = misc_feature - bicyclic nucleic acid scaffold modification
  modified_base 9: mod_base = OTHER; note = misc_feature - bicyclic nucleic acid scaffold modification
  modified_base 16: mod_base = OTHER; note = misc_feature - bicyclic nucleic acid scaffold modification
  source 1..16: mol_type = other RNA
cactgattctgaattc

SEQ ID NO: 5124 - RNA, 16 nt, synthetic construct
  misc_feature 1..16: note = Antisense oligonucleotide
  modified_base 1: mod_base = OTHER; note = misc_feature - bicyclic nucleic acid scaffold modification
  modified_base 11: mod_base = OTHER; note = misc_feature - bicyclic nucleic acid scaffold modification
  modified_base 16: mod_base = OTHER; note = misc_feature - bicyclic nucleic acid scaffold modification
  source 1..16: mol_type = other RNA
cactgattctgaattc

SEQ ID NO: 5125 - RNA, 16 nt, synthetic construct
  misc_feature 1..16: note = Antisense oligonucleotide
  modified_base 1: mod_base = OTHER; note = misc_feature - bicyclic nucleic acid scaffold modification
  modified_base 5: mod_base = OTHER; note = misc_feature - bicyclic nucleic acid scaffold modification
  modified_base 11: mod_base = OTHER; note = misc_feature - bicyclic nucleic acid scaffold modification
  modified_base 16: mod_base = OTHER; note = misc_feature - bicyclic nucleic acid scaffold modification
  source 1..16: mol_type = other RNA
cactgattctgaattc

SEQ ID NO: 5126 - RNA, 16 nt, synthetic construct
  misc_feature 1..16: note = Antisense oligonucleotide
  modified_base 1: mod_base = OTHER; note = misc_feature - bicyclic nucleic acid scaffold modification
  modified_base 3: mod_base = OTHER; note = misc_feature - bicyclic nucleic acid scaffold modification
  modified_base 9: mod_base = OTHER; note = misc_feature - bicyclic nucleic acid scaffold modification
  modified_base 16: mod_base = OTHER; note = misc_feature - bicyclic nucleic acid scaffold modification
  source 1..16: mol_type = other RNA
cactgattctgaattc

SEQ ID NO: 5127 - RNA, 16 nt, synthetic construct
  modified_base 15: mod_base = OTHER; note = thymine
  misc_feature 1..16: note = Antisense oligonucleotide
  modified_base 1..2: mod_base = OTHER; note = misc_feature - bicyclic nucleic acid scaffold modification
  modified_base 5: mod_base = OTHER; note = misc_feature - bicyclic nucleic acid scaffold modification
  modified_base 15..16: mod_base = OTHER; note = misc_feature - bicyclic nucleic acid scaffold modification
  source 1..16: mol_type = other RNA
cactgattctgaattc

SEQ ID NO: 5128 - RNA, 16 nt, synthetic construct
  modified_base 15: mod_base = OTHER; note = thymine
  misc_feature 1..16: note = Antisense oligonucleotide
  modified_base 1: mod_base = OTHER; note = misc_feature - bicyclic nucleic acid scaffold modification
  modified_base 3: mod_base = OTHER; note = misc_feature - bicyclic nucleic acid scaffold modification
  modified_base 9: mod_base = OTHER; note = misc_feature - bicyclic nucleic acid scaffold modification
  modified_base 15..16: mod_base = OTHER; note = misc_feature - bicyclic nucleic acid scaffold modification
  source 1..16: mol_type = other RNA
cactgattctgaattc

SEQ ID NO: 5129 - RNA, 16 nt, synthetic construct
  modified_base 15: mod_base = OTHER; note = thymine
  misc_feature 1..16: note = Antisense oligonucleotide
  modified_base 1..2: mod_base = OTHER; note = misc_feature - bicyclic nucleic acid scaffold modification
  modified_base 15..16: mod_base = OTHER; note = misc_feature - bicyclic nucleic acid scaffold modification
  source 1..16: mol_type = other RNA
cactgattctgaattc

SEQ ID NO: 5130 - RNA, 16 nt, synthetic construct
  modified_base 15: mod_base = OTHER; note = thymine
  misc_feature 1..16: note = Antisense oligonucleotide
  modified_base 1..2: mod_base = OTHER; note = misc_feature - bicyclic nucleic acid scaffold modification
  modified_base 5: mod_base = OTHER; note = misc_feature - bicyclic nucleic acid scaffold modification
  modified_base 11: mod_base = OTHER; note = misc_feature - bicyclic nucleic acid scaffold modification
  modified_base 15..16: mod_base = OTHER; note = misc_feature - bicyclic nucleic acid scaffold modification
  source 1..16: mol_type = other RNA
cactgattctgaattc

SEQ ID NO: 5131 - RNA, 16 nt, synthetic construct
  modified_base 16: mod_base = OTHER; note = thymine
  misc_feature 1..16: note = Antisense oligonucleotide
  modified_base 1: mod_base = OTHER; note = misc_feature - bicyclic nucleic acid scaffold modification
  modified_base 16: mod_base = OTHER; note = misc_feature - bicyclic nucleic acid scaffold modification
  source 1..16: mol_type = other RNA
actgattctgaattct

SEQ ID NO: 5132 - RNA, 16 nt, synthetic construct
  modified_base 16: mod_base = OTHER; note = thymine
  misc_feature 1..16: note = Antisense oligonucleotide
  modified_base 1: mod_base = OTHER; note = misc_feature - bicyclic nucleic acid scaffold modification
  modified_base 4: mod_base = OTHER; note = misc_feature - bicyclic nucleic acid scaffold modification
  modified_base 16: mod_base = OTHER; note = misc_feature - bicyclic nucleic acid scaffold modification
  source 1..16: mol_type = other RNA
actgattctgaattct

SEQ ID NO: 5133 - RNA, 16 nt, synthetic construct
  modified_base 16: mod_base = OTHER; note = thymine
  misc_feature 1..16: note = Antisense oligonucleotide
  modified_base 1: mod_base = OTHER; note = misc_feature - bicyclic nucleic acid scaffold modification
  modified_base 8: mod_base = OTHER; note = misc_feature - bicyclic nucleic acid scaffold modification
  modified_base 16: mod_base = OTHER; note = misc_feature - bicyclic nucleic acid scaffold modification
  source 1..16: mol_type = other RNA
actgattctgaattct

SEQ ID NO: 5134 - RNA, 16 nt, synthetic construct
  modified_base 16: mod_base = OTHER; note = thymine
  misc_feature 1..16: note = Antisense oligonucleotide
  modified_base 2: mod_base = OTHER; note = misc_feature - bicyclic nucleic acid scaffold modification
  modified_base 10: mod_base = OTHER; note = misc_feature - bicyclic nucleic acid scaffold modification
  modified_base 16: mod_base = OTHER; note = misc_feature - bicyclic nucleic acid scaffold modification
  source 1..16: mol_type = other RNA
actgattctgaattct

SEQ ID NO: 5135 - RNA, 16 nt, synthetic construct
  modified_base 16: mod_base = OTHER; note = thymine
  misc_feature 1..16: note = Antisense oligonucleotide
  modified_base 1: mod_base = OTHER; note = misc_feature - bicyclic nucleic acid scaffold modification
  modified_base 10: mod_base = OTHER; note = misc_feature - bicyclic nucleic acid scaffold modification
  modified_base 16: mod_base = OTHER; note = misc_feature - bicyclic nucleic acid scaffold modification
  source 1..16: mol_type = other RNA
actgattctgaattct

SEQ ID NO: 5136 - RNA, 16 nt, synthetic construct
  modified_base 16: mod_base = OTHER; note = thymine
  misc_feature 1..16: note = Antisense oligonucleotide
  modified_base 1: mod_base = OTHER; note = misc_feature - bicyclic nucleic acid scaffold modification
  modified_base 4: mod_base = OTHER; note = misc_feature - bicyclic nucleic acid scaffold modification
  modified_base 10: mod_base = OTHER; note = misc_feature - bicyclic nucleic acid scaffold modification
  modified_base 16: mod_base = OTHER; note = misc_feature - bicyclic nucleic acid scaffold modification
  source 1..16: mol_type = other RNA
actgattctgaattct

SEQ ID NO: 5137 - RNA, 16 nt, synthetic construct
  modified_base 16: mod_base = OTHER; note = thymine
  misc_feature 1..16: note = Antisense oligonucleotide
  modified_base 2: mod_base = OTHER; note = misc_feature - bicyclic nucleic acid scaffold modification
  modified_base 8: mod_base = OTHER; note = misc_feature - bicyclic nucleic acid scaffold modification
  modified_base 16: mod_base = OTHER; note = misc_feature - bicyclic nucleic acid scaffold modification
  source 1..16: mol_type = other RNA
actgattctgaattct

SEQ ID NO: 5138 - RNA, 16 nt, synthetic construct
  modified_base 16: mod_base = OTHER; note = thymine
  misc_feature 1..16: note = Antisense oligonucleotide
  modified_base 1: mod_base = OTHER; note = misc_feature - bicyclic nucleic acid scaffold modification
  modified_base 15..16: mod_base = OTHER; note = misc_feature - bicyclic nucleic acid scaffold modification
  source 1..16: mol_type = other RNA
actgattctgaattct

SEQ ID NO: 5139 - RNA, 16 nt, synthetic construct
  modified_base 16: mod_base = OTHER; note = thymine
  misc_feature 1..16: note = Antisense oligonucleotide
  modified_base 1: mod_base = OTHER; note = misc_feature - bicyclic nucleic acid scaffold modification
  modified_base 4: mod_base = OTHER; note = misc_feature - bicyclic nucleic acid scaffold modification
  modified_base 8: mod_base = OTHER; note = misc_feature - bicyclic nucleic acid scaffold modification
  modified_base 15..16: mod_base = OTHER; note = misc_feature - bicyclic nucleic acid scaffold modification
  source 1..16: mol_type = other RNA
actgattctgaattct

SEQ ID NO: 5140 - RNA, 16 nt, synthetic construct
  modified_base 16: mod_base = OTHER; note = thymine
  misc_feature 1..16: note = Antisense oligonucleotide
  modified_base 1: mod_base = OTHER; note = misc_feature - bicyclic nucleic acid scaffold modification
  modified_base 8: mod_base = OTHER; note = misc_feature - bicyclic nucleic acid scaffold modification
  modified_base 10: mod_base = OTHER; note = misc_feature - bicyclic nucleic acid scaffold modification
  modified_base 15..16: mod_base = OTHER; note = misc_feature - bicyclic nucleic acid scaffold modification
  source 1..16: mol_type = other RNA
actgattctgaattct

SEQ ID NO: 5141 - RNA, 16 nt, synthetic construct
  modified_base 16: mod_base = OTHER; note = thymine
  misc_feature 1..16: note = Antisense oligonucleotide
  modified_base 2: mod_base = OTHER; note = misc_feature - bicyclic nucleic acid scaffold modification
  modified_base 4: mod_base = OTHER; note = misc_feature - bicyclic nucleic acid scaffold modification
  modified_base 8: mod_base = OTHER; note = misc_feature - bicyclic nucleic acid scaffold modification
  modified_base 10: mod_base = OTHER; note = misc_feature - bicyclic nucleic acid scaffold modification
  modified_base 15..16: mod_base = OTHER; note = misc_feature - bicyclic nucleic acid scaffold modification
  source 1..16: mol_type = other RNA
actgattctgaattct

SEQ ID NO: 5142 - RNA, 16 nt, synthetic construct
  modified_base 16: mod_base = OTHER; note = thymine
  misc_feature 1..16: note = Antisense oligonucleotide
  modified_base 1: mod_base = OTHER; note = misc_feature - bicyclic nucleic acid scaffold modification
  modified_base 16: mod_base = OTHER; note = misc_feature - bicyclic nucleic acid scaffold modification
  source 1..16: mol_type = other RNA
ctgattctgaattctt

SEQ ID NO: 5143 - RNA, 16 nt, synthetic construct
  modified_base 16: mod_base = OTHER; note = thymine
  misc_feature 1..16: note = Antisense oligonucleotide
  modified_base 1: mod_base = OTHER; note = misc_feature - bicyclic nucleic acid scaffold modification
  modified_base 3: mod_base = OTHER; note = misc_feature - bicyclic nucleic acid scaffold modification
  modified_base 16: mod_base = OTHER; note = misc_feature - bicyclic nucleic acid scaffold modification
  source 1..16: mol_type = other RNA
ctgattctgaattctt

SEQ ID NO: 5144 - RNA, 16 nt, synthetic construct
  modified_base 16: mod_base = OTHER; note = thymine
  misc_feature 1..16: note = Antisense oligonucleotide
  modified_base 1: mod_base = OTHER; note = misc_feature - bicyclic nucleic acid scaffold modification
  modified_base 7: mod_base = OTHER; note = misc_feature - bicyclic nucleic acid scaffold modification
  modified_base 16: mod_base = OTHER; note = misc_feature - bicyclic nucleic acid scaffold modification
  source 1..16: mol_type = other RNA
ctgattctgaattctt

SEQ ID NO: 5145 - RNA, 16 nt, synthetic construct
  modified_base 16: mod_base = OTHER; note = thymine
  misc_feature 1..16: note = Antisense oligonucleotide
  modified_base 1: mod_base = OTHER; note = misc_feature - bicyclic nucleic acid scaffold modification
  modified_base 9: mod_base = OTHER; note = misc_feature - bicyclic nucleic acid scaffold modification
  modified_base 16: mod_base = OTHER; note = misc_feature - bicyclic nucleic acid scaffold modification
  source 1..16: mol_type = other RNA
ctgattctgaattctt

SEQ ID NO: 5146 - RNA, 16 nt, synthetic construct
  modified_base 16: mod_base = OTHER; note = thymine
  misc_feature 1..16: note = Antisense oligonucleotide
  modified_base 1: mod_base = OTHER; note = misc_feature - bicyclic nucleic acid scaffold modification
  modified_base 14: mod_base = OTHER; note = misc_feature - bicyclic nucleic acid scaffold modification
  modified_base 16: mod_base = OTHER; note = misc_feature - bicyclic nucleic acid scaffold modification
  source 1..16: mol_type = other RNA
ctgattctgaattctt

SEQ ID NO: 5147 - RNA, 16 nt, synthetic construct
  modified_base 16: mod_base = OTHER; note = thymine
  misc_feature 1..16: note = Antisense oligonucleotide
  modified_base 1: mod_base = OTHER; note = misc_feature - bicyclic nucleic acid scaffold modification
  modified_base 14: mod_base = OTHER; note = misc_feature - bicyclic nucleic acid scaffold modification
  modified_base 16: mod_base = OTHER; note = misc_feature - bicyclic nucleic acid scaffold modification
  source 1..16: mol_type = other RNA
ctgattctgaattctt

SEQ ID NO: 5148 - RNA, 16 nt, synthetic construct
  modified_base 16: mod_base = OTHER; note = thymine
  misc_feature 1..16: note = Antisense oligonucleotide
  modified_base 1: mod_base = OTHER; note = misc_feature - bicyclic nucleic acid scaffold modification
  modified_base 3: mod_base = OTHER; note = misc_feature - bicyclic nucleic acid scaffold modification
  modified_base 9: mod_base = OTHER; note = misc_feature - bicyclic nucleic acid scaffold modification
  modified_base 16: mod_base = OTHER; note = misc_feature - bicyclic nucleic acid scaffold modification
  source 1..16: mol_type = other RNA
ctgattctgaattctt

SEQ ID NO: 5149 - RNA, 16 nt, synthetic construct
  modified_base 16: mod_base = OTHER; note = thymine
  misc_feature 1..16: note = Antisense oligonucleotide
  modified_base 1: mod_base = OTHER; note = misc_feature - bicyclic nucleic acid scaffold modification
  modified_base 3: mod_base = OTHER; note = misc_feature - bicyclic nucleic acid scaffold modification
  modified_base 14: mod_base = OTHER; note = misc_feature - bicyclic nucleic acid scaffold modification
  modified_base 16: mod_base = OTHER; note = misc_feature - bicyclic nucleic acid scaffold modification
  source 1..16: mol_type = other RNA
ctgattctgaattctt

SEQ ID NO: 5150 - RNA, 16 nt, synthetic construct
  modified_base 15..16: mod_base = OTHER; note = thymine
  misc_feature 1..16: note = Antisense oligonucleotide
  modified_base 1: mod_base = OTHER; note = misc_feature - bicyclic nucleic acid scaffold modification
  modified_base 7: mod_base = OTHER; note = misc_feature - bicyclic nucleic acid scaffold modification
  modified_base 9: mod_base = OTHER; note = misc_feature - bicyclic nucleic acid scaffold modification
  modified_base 15..16: mod_base = OTHER; note = misc_feature - bicyclic nucleic acid scaffold modification
  source 1..16: mol_type = other RNA
ctgattctgaattctt

SEQ ID NO: 5151 - RNA, 16 nt, synthetic construct
  modified_base 2: mod_base = OTHER; note = thymine
  modified_base 15..16: mod_base = OTHER; note = thymine
  misc_feature 1..16: note = Antisense oligonucleotide
  modified_base 1..2: mod_base = OTHER; note = misc_feature - bicyclic nucleic acid scaffold modification
  modified_base 15..16: mod_base = OTHER; note = misc_feature - bicyclic nucleic acid scaffold modification
  source 1..16: mol_type = other RNA
ctgattctgaattctt

SEQ ID NO: 5152 - RNA, 16 nt, synthetic construct
  modified_base 2: mod_base = OTHER; note = thymine
  modified_base 15..16: mod_base = OTHER; note = thymine
  misc_feature 1..16: note = Antisense oligonucleotide
  modified_base 1..2: mod_base = OTHER; note = misc_feature - bicyclic nucleic acid scaffold modification
  modified_base 9: mod_base = OTHER; note = misc_feature - bicyclic nucleic acid scaffold modification
  modified_base 14..16: mod_base = OTHER; note = misc_feature - bicyclic nucleic acid scaffold modification
  source 1..16: mol_type = other RNA
ctgattctgaattctt

SEQ ID NO: 5153 - RNA, 16 nt, synthetic construct
  modified_base 1: mod_base = OTHER; note = thymine
  modified_base 16: mod_base = OTHER; note = thymine
  misc_feature 1..16: note = Antisense oligonucleotide
  modified_base 1: mod_base = OTHER; note = misc_feature - bicyclic nucleic acid scaffold modification
  modified_base 16: mod_base = OTHER; note = misc_feature - bicyclic nucleic acid scaffold modification
  source 1..16: mol_type = other RNA
tgattctgaattcttt

SEQ ID NO: 5154 - RNA, 16 nt, synthetic construct
  modified_base 1: mod_base = OTHER; note = thymine
  modified_base 16: mod_base = OTHER; note = thymine
  misc_feature 1..16: note = Antisense oligonucleotide
  modified_base 1..2: mod_base = OTHER; note = misc_feature - bicyclic nucleic acid scaffold modification
  modified_base 16: mod_base = OTHER; note = misc_feature - bicyclic nucleic acid scaffold modification
  source 1..16: mol_type = other RNA
tgattctgaattcttt

SEQ ID NO: 5155 - RNA, 16 nt, synthetic construct
  modified_base 1: mod_base = OTHER; note = thymine
  modified_base 16: mod_base = OTHER; note = thymine
  misc_feature 1..16: note = Antisense oligonucleotide
  modified_base 1: mod_base = OTHER; note = misc_feature - bicyclic nucleic acid scaffold modification
  modified_base 6: mod_base = OTHER; note = misc_feature - bicyclic nucleic acid scaffold modification
  modified_base 16: mod_base = OTHER; note = misc_feature - bicyclic nucleic acid scaffold modification
  source 1..16: mol_type = other RNA
tgattctgaattcttt

SEQ ID NO: 5156 - RNA, 16 nt, synthetic construct
  modified_base 1: mod_base = OTHER; note = thymine
  modified_base 16: mod_base = OTHER; note = thymine
  misc_feature 1..16: note = Antisense oligonucleotide
  modified_base 1: mod_base = OTHER; note = misc_feature - bicyclic nucleic acid scaffold modification
  modified_base 8: mod_base = OTHER; note = misc_feature - bicyclic nucleic acid scaffold modification
  modified_base 16: mod_base = OTHER; note = misc_feature - bicyclic nucleic acid scaffold modification
  source 1..16: mol_type = other RNA
tgattctgaattcttt

SEQ ID NO: 5157 - RNA, 16 nt, synthetic construct
  modified_base 1: mod_base = OTHER; note = thymine
  modified_base 16: mod_base = OTHER; note = thymine
  misc_feature 1..16: note = Antisense oligonucleotide
  modified_base 1: mod_base = OTHER; note = misc_feature - bicyclic nucleic acid scaffold modification
  modified_base 13: mod_base = OTHER; note = misc_feature - bicyclic nucleic acid scaffold modification
  modified_base 16: mod_base = OTHER; note = misc_feature - bicyclic nucleic acid scaffold modification
  source 1..16: mol_type = other RNA
tgattctgaattcttt

SEQ ID NO: 5158 - RNA, 16 nt, synthetic construct
  modified_base 1: mod_base = OTHER; note = thymine
  modified_base 16: mod_base = OTHER; note = thymine
  misc_feature 1..16: note = Antisense oligonucleotide
  modified_base 1: mod_base = OTHER; note = misc_feature - bicyclic nucleic acid scaffold modification
  modified_base 6: mod_base = OTHER; note = misc_feature - bicyclic nucleic acid scaffold modification
  modified_base 13: mod_base = OTHER; note = misc_feature - bicyclic nucleic acid scaffold modification
  modified_base 16: mod_base = OTHER; note = misc_feature - bicyclic nucleic acid scaffold modification
  source 1..16: mol_type = other RNA
tgattctgaattcttt

SEQ ID NO: 5159 - RNA, 16 nt, synthetic construct
  modified_base 1: mod_base = OTHER; note = thymine
  modified_base 16: mod_base = OTHER; note = thymine
  misc_feature 1..16: note = Antisense oligonucleotide
  modified_base 1..2: mod_base = OTHER; note = misc_feature - bicyclic nucleic acid scaffold modification
  modified_base 8: mod_base = OTHER; note = misc_feature - bicyclic nucleic acid scaffold modification
  modified_base 16: mod_base = OTHER; note = misc_feature - bicyclic nucleic acid scaffold modification
  source 1..16: mol_type = other RNA
tgattctgaattcttt

SEQ ID NO: 5160 - RNA, 16 nt, synthetic construct
  modified_base 1: mod_base = OTHER; note = thymine
  modified_base 16: mod_base = OTHER; note = thymine
  misc_feature 1..16: note = Antisense oligonucleotide
  modified_base 1..2: mod_base = OTHER; note = misc_feature - bicyclic nucleic acid scaffold modification
  modified_base 6: mod_base = OTHER; note = misc_feature - bicyclic nucleic acid scaffold modification
  modified_base 13: mod_base = OTHER; note = misc_feature - bicyclic nucleic acid scaffold modification
  modified_base 16: mod_base = OTHER; note = misc_feature - bicyclic nucleic acid scaffold modification
  source 1..16: mol_type = other RNA
tgattctgaattcttt

SEQ ID NO: 5161 - RNA, 16 nt, synthetic construct
  modified_base 1: mod_base = OTHER; note = thymine
  modified_base 15..16: mod_base = OTHER; note = thymine
  misc_feature 1..16: note = Antisense oligonucleotide
  modified_base 1: mod_base = OTHER; note = misc_feature - bicyclic nucleic acid scaffold modification
  modified_base 6: mod_base = OTHER; note = misc_feature - bicyclic nucleic acid scaffold modification
  modified_base 13: mod_base = OTHER; note = misc_feature - bicyclic nucleic acid scaffold modification
  modified_base 15..16: mod_base = OTHER; note = misc_feature - bicyclic nucleic acid scaffold modification
  source 1..16: mol_type = other RNA
tgattctgaattcttt

SEQ ID NO: 5162 - RNA, 16 nt, synthetic construct
  modified_base 1: mod_base = OTHER; note = thymine
  modified_base 15..16: mod_base = OTHER; note = thymine
  misc_feature 1..16: note = Antisense oligonucleotide
  modified_base 1..2: mod_base = OTHER; note = misc_feature - bicyclic nucleic acid scaffold modification
  modified_base 8: mod_base = OTHER; note = misc_feature - bicyclic nucleic acid scaffold modification
  modified_base 15..16: mod_base = OTHER; note = misc_feature - bicyclic nucleic acid scaffold modification
  source 1..16: mol_type = other RNA
tgattctgaattcttt

SEQ ID NO: 5163 - RNA, 16 nt, synthetic construct
  modified_base 1: mod_base = OTHER; note = thymine
  modified_base 15..16: mod_base = OTHER; note = thymine
  misc_feature 1..16: note = Antisense oligonucleotide
  modified_base 1..2: mod_base = OTHER; note = misc_feature - bicyclic nucleic acid scaffold modification
  modified_base 6: mod_base = OTHER; note = misc_feature - bicyclic nucleic acid scaffold modification
  modified_base 8: mod_base = OTHER; note = misc_feature - bicyclic nucleic acid scaffold modification
  modified_base 15..16: mod_base = OTHER; note = misc_feature - bicyclic nucleic acid scaffold modification
  source 1..16: mol_type = other RNA
tgattctgaattcttt

SEQ ID NO: 5164 - RNA, 16 nt, synthetic construct
  misc_feature 1..16: note = Antisense oligonucleotide
  modified_base 1: mod_base = OTHER; note = misc_feature - bicyclic nucleic acid scaffold modification
  modified_base 16: mod_base = OTHER; note = misc_feature - bicyclic nucleic acid scaffold modification
  source 1..16: mol_type = other RNA
gattctgaattctttc

SEQ ID NO: 5165 - RNA, 16 nt, synthetic construct
  misc_feature 1..16: note = Antisense oligonucleotide
  modified_base 1: mod_base = OTHER; note = misc_feature - bicyclic nucleic acid scaffold modification
  modified_base 5: mod_base = OTHER; note = misc_feature - bicyclic nucleic acid scaffold modification
  modified_base 16: mod_base = OTHER; note = misc_feature - bicyclic nucleic acid scaffold modification
  source 1..16: mol_type = other RNA
gattctgaattctttc

SEQ ID NO: 5166 - RNA, 16 nt, synthetic construct
  misc_feature 1..16: note = Antisense oligonucleotide
  modified_base 1: mod_base = OTHER; note = misc_feature - bicyclic nucleic acid scaffold modification
  modified_base 7: mod_base = OTHER; note = misc_feature - bicyclic nucleic acid scaffold modification
  modified_base 16: mod_base = OTHER; note = misc_feature - bicyclic nucleic acid scaffold modification
  source 1..16: mol_type = other RNA
gattctgaattctttc

SEQ ID NO: 5167 - RNA, 16 nt, synthetic construct
  misc_feature 1..16: note = Antisense oligonucleotide
  modified_base 1: mod_base = OTHER; note = misc_feature - bicyclic nucleic acid scaffold modification
  modified_base 12: mod_base = OTHER; note = misc_feature - bicyclic nucleic acid scaffold modification
  modified_base 16: mod_base = OTHER; note = misc_feature - bicyclic nucleic acid scaffold modification
  source 1..16: mol_type = other RNA
gattctgaattctttc

SEQ ID NO: 5168 - RNA, 16 nt, synthetic construct
  misc_feature 1..16: note = Antisense oligonucleotide
  modified_base 1: mod_base = OTHER; note = misc_feature - bicyclic nucleic acid scaffold modification
  modified_base 5: mod_base = OTHER; note = misc_feature - bicyclic nucleic acid scaffold modification
  modified_base 12: mod_base = OTHER; note = misc_feature - bicyclic nucleic acid scaffold modification
  modified_base 16: mod_base = OTHER; note = misc_feature - bicyclic nucleic acid scaffold modification
  source 1..16: mol_type = other RNA
gattctgaattctttc

SEQ ID NO: 5169 - RNA, 16 nt, synthetic construct
  misc_feature 1..16: note = Antisense oligonucleotide
  modified_base 1: mod_base = OTHER; note = misc_feature - bicyclic nucleic acid scaffold modification
  modified_base 7: mod_base = OTHER; note = misc_feature - bicyclic nucleic acid scaffold modification
  modified_base 12: mod_base = OTHER; note = misc_feature - bicyclic nucleic acid scaffold modification
  modified_base 16: mod_base = OTHER; note = misc_feature - bicyclic nucleic acid scaffold modification
  source 1..16: mol_type = other RNA
gattctgaattctttc

SEQ ID NO: 5170 - RNA, 16 nt, synthetic construct
  modified_base 15: mod_base = OTHER; note = thymine
  misc_feature 1..16: note = Antisense oligonucleotide
  modified_base 1: mod_base = OTHER; note = misc_feature - bicyclic nucleic acid scaffold modification
  modified_base 7: mod_base = OTHER; note = misc_feature - bicyclic nucleic acid scaffold modification
  modified_base 15..16: mod_base = OTHER; note = misc_feature - bicyclic nucleic acid scaffold modification
  source 1..16: mol_type = other RNA
gattctgaattctttc

SEQ ID NO: 5171 - RNA, 16 nt, synthetic construct
  modified_base 15: mod_base = OTHER; note = thymine
  misc_feature 1..16: note = Antisense oligonucleotide
  modified_base 1..2: mod_base = OTHER; note = misc_feature - bicyclic nucleic acid scaffold modification
  modified_base 15..16: mod_base = OTHER; note = misc_feature - bicyclic nucleic acid scaffold modification
  source 1..16: mol_type = other RNA
gattctgaattctttc

SEQ ID NO: 5172 - RNA, 16 nt, synthetic construct
  modified_base 15: mod_base = OTHER; note = thymine
  misc_feature 1..16: note = Antisense oligonucleotide
  modified_base 1: mod_base = OTHER; note = misc_feature - bicyclic nucleic acid scaffold modification
  modified_base 5: mod_base = OTHER; note = misc_feature - bicyclic nucleic acid scaffold modification
  modified_base 7: mod_base = OTHER; note = misc_feature - bicyclic nucleic acid scaffold modification
  modified_base 15..16: mod_base = OTHER; note = misc_feature - bicyclic nucleic acid scaffold modification
  source 1..16: mol_type = other RNA
gattctgaattctttc

SEQ ID NO: 5173 - RNA, 16 nt, synthetic construct
  modified_base 15: mod_base = OTHER; note = thymine
  misc_feature 1..16: note = Antisense oligonucleotide
  modified_base 1: mod_base = OTHER; note = misc_feature - bicyclic nucleic acid scaffold modification
  modified_base 5: mod_base = OTHER; note = misc_feature - bicyclic nucleic acid scaffold modification
  modified_base 7: mod_base = OTHER; note = misc_feature - bicyclic nucleic acid scaffold modification
  modified_base 12: mod_base = OTHER; note = misc_feature - bicyclic nucleic acid scaffold modification
  modified_base 15..16: mod_base = OTHER; note = misc_feature - bicyclic nucleic acid scaffold modification
  source 1..16: mol_type = other RNA
gattctgaattctttc

SEQ ID NO: 5174 - RNA, 24 nt, synthetic construct
  modified_base 24: mod_base = OTHER; note = thymine
  misc_feature 1..24: note = Antisense oligonucleotide
  modified_base 1: mod_base = OTHER; note = misc_feature - bicyclic nucleic acid scaffold modification
  modified_base 24: mod_base = OTHER; note = misc_feature - bicyclic nucleic acid scaffold modification
  source 1..24: mol_type = other RNA
gttcttgtacttcatcccactgat

SEQ ID NO: 5175 - RNA, 24 nt, synthetic construct
  modified_base 24: mod_base = OTHER; note = thymine
  misc_feature 1..24: note = Antisense oligonucleotide
  modified_base 1: mod_base = OTHER; note = misc_feature - bicyclic nucleic acid scaffold modification
  modified_base 4: mod_base = OTHER; note = misc_feature - bicyclic nucleic acid scaffold modification
  modified_base 24: mod_base = OTHER; note = misc_feature - bicyclic nucleic acid scaffold modification
  source 1..24: mol_type = other RNA
gttcttgtacttcatcccactgat

SEQ ID NO: 5176 - RNA, 24 nt, synthetic construct
  modified_base 24: mod_base = OTHER; note = thymine
  misc_feature 1..24: note = Antisense oligonucleotide
  modified_base 1: mod_base = OTHER; note = misc_feature - bicyclic nucleic acid scaffold modification
  modified_base 7: mod_base = OTHER; note = misc_feature - bicyclic nucleic acid scaffold modification
  modified_base 24: mod_base = OTHER; note = misc_feature - bicyclic nucleic acid scaffold modification
  source 1..24: mol_type = other RNA
gttcttgtacttcatcccactgat

SEQ ID NO: 5177 - RNA, 24 nt, synthetic construct
  modified_base 24: mod_base = OTHER; note = thymine
  misc_feature 1..24: note = Antisense oligonucleotide
  modified_base 1: mod_base = OTHER; note = misc_feature - bicyclic nucleic acid scaffold modification
  modified_base 10: mod_base = OTHER; note = misc_feature - bicyclic nucleic acid scaffold modification
  modified_base 24: mod_base = OTHER; note = misc_feature - bicyclic nucleic acid scaffold modification
  source 1..24: mol_type = other RNA
gttcttgtacttcatcccactgat

SEQ ID NO: 5178 - RNA, 24 nt, synthetic construct
  modified_base 24: mod_base = OTHER; note = thymine
  misc_feature 1..24: note = Antisense oligonucleotide
  modified_base 1: mod_base = OTHER; note = misc_feature - bicyclic nucleic acid scaffold modification
  modified_base 13: mod_base = OTHER; note = misc_feature - bicyclic nucleic acid scaffold modification
  modified_base 24: mod_base = OTHER; note = misc_feature - bicyclic nucleic acid scaffold modification
  source 1..24: mol_type = other RNA
gttcttgtacttcatcccactgat

SEQ ID NO: 5179 - RNA, 24 nt, synthetic construct
  modified_base 24: mod_base = OTHER; note = thymine
  misc_feature 1..24: note = Antisense oligonucleotide
  modified_base 1: mod_base = OTHER; note = misc_feature - bicyclic nucleic acid scaffold modification
  modified_base 20: mod_base = OTHER; note = misc_feature - bicyclic nucleic acid scaffold modification
  modified_base 24: mod_base = OTHER; note = misc_feature - bicyclic nucleic acid scaffold modification
  source 1..24: mol_type = other RNA
gttcttgtacttcatcccactgat

SEQ ID NO: 5180 - RNA, 24 nt, synthetic construct
  modified_base 24: mod_base = OTHER; note = thymine
  misc_feature 1..24: note = Antisense oligonucleotide
  modified_base 1: mod_base = OTHER; note = misc_feature - bicyclic nucleic acid scaffold modification
  modified_base 22: mod_base = OTHER; note = misc_feature - bicyclic nucleic acid scaffold modification
  modified_base 24: mod_base = OTHER; note = misc_feature - bicyclic nucleic acid scaffold modification
  source 1..24: mol_type = other RNA
gttcttgtacttcatcccactgat

SEQ ID NO: 5181 - RNA, 24 nt, synthetic construct
  modified_base 24: mod_base = OTHER; note = thymine
  misc_feature 1..24: note = Antisense oligonucleotide
  modified_base 1: mod_base = OTHER; note = misc_feature - bicyclic nucleic acid scaffold modification
  modified_base 7: mod_base = OTHER; note = misc_feature - bicyclic nucleic acid scaffold modification
  modified_base 22: mod_base = OTHER; note = misc_feature - bicyclic nucleic acid scaffold modification
  modified_base 24: mod_base = OTHER; note = misc_feature - bicyclic nucleic acid scaffold modification
  source 1..24: mol_type = other RNA
gttcttgtacttcatcccactgat

SEQ ID NO: 5182 - RNA, 24 nt, synthetic construct
  modified_base 24: mod_base = OTHER; note = thymine
  misc_feature 1..24: note = Antisense oligonucleotide
  modified_base 1: mod_base = OTHER; note = misc_feature - bicyclic nucleic acid scaffold modification
  modified_base 13: mod_base = OTHER; note = misc_feature - bicyclic nucleic acid scaffold modification
  modified_base 20: mod_base = OTHER; note = misc_feature - bicyclic nucleic acid scaffold modification
  modified_base 24: mod_base = OTHER; note = misc_feature - bicyclic nucleic acid scaffold modification
  source 1..24: mol_type = other RNA
gttcttgtacttcatcccactgat

SEQ ID NO: 5183 - RNA, 24 nt, synthetic construct
  modified_base 24: mod_base = OTHER; note = thymine
  misc_feature 1..24: note = Antisense oligonucleotide
  modified_base 1: mod_base = OTHER; note = misc_feature - bicyclic nucleic acid scaffold modification
  modified_base 4: mod_base = OTHER; note = misc_feature - bicyclic nucleic acid scaffold modification
  modified_base 13: mod_base = OTHER; note = misc_feature - bicyclic nucleic acid scaffold modification
  modified_base 24: mod_base = OTHER; note = misc_feature - bicyclic nucleic acid scaffold modification
  source 1..24: mol_type = other RNA
gttcttgtacttcatcccactgat

SEQ ID NO: 5184 - RNA, 24 nt, synthetic construct
  modified_base 24: mod_base = OTHER; note = thymine
  misc_feature 1..24: note = Antisense oligonucleotide
  modified_base 1: mod_base = OTHER; note = misc_feature - bicyclic nucleic acid scaffold modification
  modified_base 10: mod_base = OTHER; note = misc_feature - bicyclic nucleic acid scaffold modification
  modified_base 20: mod_base = OTHER; note = misc_feature - bicyclic nucleic acid scaffold modification
  modified_base 24: mod_base = OTHER; note = misc_feature - bicyclic nucleic acid scaffold modification
  source 1..24: mol_type = other RNA
gttcttgtacttcatcccactgat

SEQ ID NO: 5185 - RNA, 24 nt, synthetic construct
  modified_base 2: mod_base = OTHER; note = thymine
  modified_base 24: mod_base = OTHER; note = thymine
  misc_feature 1..24: note = Antisense oligonucleotide
  modified_base 1..2: mod_base = OTHER; note = misc_feature - bicyclic nucleic acid scaffold modification
  modified_base 7: mod_base = OTHER; note = misc_feature - bicyclic nucleic acid scaffold modification
  modified_base 24: mod_base = OTHER; note = misc_feature - bicyclic nucleic acid scaffold modification
  source 1..24: mol_type = other RNA
gttcttgtacttcatcccactgat

SEQ ID NO: 5186 - RNA, 24 nt, synthetic construct
  modified_base 2: mod_base = OTHER; note = thymine
  modified_base 24: mod_base = OTHER; note = thymine
  misc_feature 1..24: note = Antisense oligonucleotide
  modified_base 1..2: mod_base = OTHER; note = misc_feature - bicyclic nucleic acid scaffold modification
  modified_base 10: mod_base = OTHER; note = misc_feature - bicyclic nucleic acid scaffold modification
  modified_base 20: mod_base = OTHER; note = misc_feature - bicyclic nucleic acid scaffold modification
  modified_base 23..24: mod_base = OTHER; note = misc_feature - bicyclic nucleic acid scaffold modification
  source 1..24: mol_type = other RNA
gttcttgtacttcatcccactgat

SEQ ID NO: 5187 - RNA, 24 nt, synthetic construct
  modified_base 2: mod_base = OTHER; note = thymine
  modified_base 24: mod_base = OTHER; note = thymine
  misc_feature 1..24: note = Antisense oligonucleotide
  modified_base 1..2: mod_base = OTHER; note = misc_feature - bicyclic nucleic acid scaffold modification
  modified_base 7: mod_base = OTHER; note = misc_feature - bicyclic nucleic acid scaffold modification
  modified_base 22..24: mod_base = OTHER; note = misc_feature - bicyclic nucleic acid scaffold modification
  source 1..24: mol_type = other RNA
gttcttgtacttcatcccactgat

SEQ ID NO: 5188 - RNA, 22 nt, synthetic construct
  misc_feature 1..22: note = Antisense oligonucleotide
  modified_base 1: mod_base = OTHER; note = misc_feature - bicyclic nucleic acid scaffold modification
  modified_base 22: mod_base = OTHER; note = misc_feature - bicyclic nucleic acid scaffold modification
  source 1..22: mol_type = other RNA
gttcttgtacttcatcccactg

SEQ ID NO: 5189 - RNA, 22 nt, synthetic construct
  misc_feature 1..22: note = Antisense oligonucleotide
  modified_base 1: mod_base = OTHER; note = misc_feature - bicyclic nucleic acid scaffold modification
  modified_base 4: mod_base = OTHER; note = misc_feature - bicyclic nucleic acid scaffold modification
  modified_base 22: mod_base = OTHER; note = misc_feature - bicyclic nucleic acid scaffold modification
  source 1..22: mol_type = other RNA
gttcttgtacttcatcccactg

SEQ ID NO: 5190 - RNA, 22 nt, synthetic construct
  misc_feature 1..22: note = Antisense oligonucleotide
  modified_base 1: mod_base = OTHER; note = misc_feature - bicyclic nucleic acid scaffold modification
  modified_base 7: mod_base = OTHER; note = misc_feature - bicyclic nucleic acid scaffold modification
  modified_base 22: mod_base = OTHER; note = misc_feature - bicyclic nucleic acid scaffold modification
  source 1..22: mol_type = other RNA
gttcttgtacttcatcccactg

SEQ ID NO: 5191 - RNA, 22 nt, synthetic construct
  misc_feature 1..22: note = Antisense oligonucleotide
  modified_base 1: mod_base = OTHER; note = misc_feature - bicyclic nucleic acid scaffold modification
  modified_base 10: mod_base = OTHER; note = misc_feature - bicyclic nucleic acid scaffold modification
  modified_base 22: mod_base = OTHER; note = misc_feature - bicyclic nucleic acid scaffold modification
  source 1..22: mol_type = other RNA
gttcttgtacttcatcccactg

SEQ ID NO: 5192 - RNA, 22 nt, synthetic construct
  misc_feature 1..22: note = Antisense oligonucleotide
  modified_base 1: mod_base = OTHER; note = misc_feature - bicyclic nucleic acid scaffold modification
  modified_base 13: mod_base = OTHER; note = misc_feature - bicyclic nucleic acid scaffold modification
  modified_base 22: mod_base = OTHER; note = misc_feature - bicyclic nucleic acid scaffold modification
  source 1..22: mol_type = other RNA
gttcttgtacttcatcccactg

SEQ ID NO: 5193 - RNA, 22 nt, synthetic construct
  misc_feature 1..22: note = Antisense oligonucleotide
  modified_base 1: mod_base = OTHER; note = misc_feature - bicyclic nucleic acid scaffold modification
  modified_base 20: mod_base = OTHER; note = misc_feature - bicyclic nucleic acid scaffold modification
  modified_base 22: mod_base = OTHER; note = misc_feature - bicyclic nucleic acid scaffold modification
  source 1..22: mol_type = other RNA
gttcttgtacttcatcccactg

SEQ ID NO: 5194 - RNA, 22 nt, synthetic construct
  misc_feature 1..22: note = Antisense oligonucleotide
  modified_base 1: mod_base = OTHER; note = misc_feature - bicyclic nucleic acid scaffold modification
  modified_base 7: mod_base = OTHER; note = misc_feature - bicyclic nucleic acid scaffold modification
  modified_base 13: mod_base = OTHER; note = misc_feature - bicyclic nucleic acid scaffold modification
  modified_base 22: mod_base = OTHER; note = misc_feature - bicyclic nucleic acid scaffold modification
  source 1..22: mol_type = other RNA
gttcttgtacttcatcccactg

SEQ ID NO: 5195 - RNA, 22 nt, synthetic construct
  misc_feature 1..22: note = Antisense oligonucleotide
  modified_base 1: mod_base = OTHER; note = misc_feature - bicyclic nucleic acid scaffold modification
  modified_base 4: mod_base = OTHER; note = misc_feature - bicyclic nucleic acid scaffold modification
  modified_base 10: mod_base = OTHER; note = misc_feature - bicyclic nucleic acid scaffold modification
  modified_base 22: mod_base = OTHER; note = misc_feature - bicyclic nucleic acid scaffold modification
  source 1..22: mol_type = other RNA
gttcttgtacttcatcccactg

SEQ ID NO: 5196 - RNA, 22 nt, synthetic construct
  misc_feature 1..22: note = Antisense oligonucleotide
  modified_base 1: mod_base = OTHER; note = misc_feature - bicyclic nucleic acid scaffold modification
  modified_base 10: mod_base = OTHER; note = misc_feature - bicyclic nucleic acid scaffold modification
  modified_base 20: mod_base = OTHER; note = misc_feature - bicyclic nucleic acid scaffold modification
  modified_base 22: mod_base = OTHER; note = misc_feature - bicyclic nucleic acid scaffold modification
  source 1..22: mol_type = other RNA
gttcttgtacttcatcccactg

SEQ ID NO: 5197 - RNA, 22 nt, synthetic construct
  modified_base 21: mod_base = OTHER; note = thymine
  misc_feature 1..22: note = Antisense oligonucleotide
  modified_base 1: mod_base = OTHER; note = misc_feature - bicyclic nucleic acid scaffold modification
  modified_base 7: mod_base = OTHER; note = misc_feature - bicyclic nucleic acid scaffold modification
  modified_base 13: mod_base = OTHER; note = misc_feature - bicyclic nucleic acid scaffold modification
  modified_base 21..22: mod_base = OTHER; note = misc_feature - bicyclic nucleic acid scaffold modification
  source 1..22: mol_type = other RNA
gttcttgtacttcatcccactg

SEQ ID NO: 5198 - RNA, 22 nt, synthetic construct
  modified_base 2: mod_base = OTHER; note = thymine
  modified_base 21: mod_base = OTHER; note = thymine
  misc_feature 1..22: note = Antisense oligonucleotide
  modified_base 1..2: mod_base = OTHER; note = misc_feature - bicyclic nucleic acid scaffold modification
  modified_base 21..22: mod_base = OTHER; note = misc_feature - bicyclic nucleic acid scaffold modification
  source 1..22: mol_type = other RNA
gttcttgtacttcatcccactg

SEQ ID NO: 5199 - RNA, 22 nt, synthetic construct
  modified_base 2: mod_base = OTHER; note = thymine
  modified_base 21: mod_base = OTHER; note = thymine
  misc_feature 1..22: note = Antisense oligonucleotide
  modified_base 1..2: mod_base = OTHER; note = misc_feature - bicyclic nucleic acid scaffold modification
  modified_base 4: mod_base = OTHER; note = misc_feature - bicyclic nucleic acid scaffold modification
  modified_base 13: mod_base = OTHER; note = misc_feature - bicyclic nucleic acid scaffold modification
  modified_base 21..22: mod_base = OTHER; note = misc_feature - bicyclic nucleic acid scaffold modification
  source 1..22: mol_type = other RNA
gttcttgtacttcatcccactg

SEQ ID NO: 5200 - RNA, 22 nt, synthetic construct
  modified_base 2: mod_base = OTHER; note = thymine
  modified_base 21: mod_base = OTHER; note = thymine
  misc_feature 1..22: note = Antisense oligonucleotide
  modified_base 1..2: mod_base = OTHER; note = misc_feature - bicyclic nucleic acid scaffold modification
  modified_base 10: mod_base = OTHER; note = misc_feature - bicyclic nucleic acid scaffold modification
  modified_base 21..22: mod_base = OTHER; note = misc_feature - bicyclic nucleic acid scaffold modification
  source 1..22: mol_type = other RNA
gttcttgtacttcatcccactg

SEQ ID NO: 5201 - RNA, 22 nt, synthetic construct
  modified_base 1: mod_base = OTHER; note = thymine
  misc_feature 1..22: note = Antisense oligonucleotide
  modified_base 1: mod_base = OTHER; note = misc_feature - bicyclic nucleic acid scaffold modification
  modified_base 22: mod_base = OTHER; note = misc_feature - bicyclic nucleic acid scaffold modification
  source 1..22: mol_type = other RNA
ttcttgtacttcatcccactga

SEQ ID NO: 5202 - RNA, 22 nt, synthetic construct
  modified_base 1: mod_base = OTHER; note = thymine
  misc_feature 1..22: note = Antisense oligonucleotide
  modified_base 1: mod_base = OTHER; note = misc_feature - bicyclic nucleic acid scaffold modification
  modified_base 3: mod_base = OTHER; note = misc_feature - bicyclic nucleic acid scaffold modification
  modified_base 22: mod_base = OTHER; note = misc_feature - bicyclic nucleic acid scaffold modification
  source 1..22: mol_type = other RNA
ttcttgtacttcatcccactga

SEQ ID NO: 5203 - RNA, 22 nt, synthetic construct
  modified_base 1: mod_base = OTHER; note = thymine
  misc_feature 1..22: note = Antisense oligonucleotide
  modified_base 1: mod_base = OTHER; note = misc_feature - bicyclic nucleic acid scaffold modification
  modified_base 6: mod_base = OTHER; note = misc_feature - bicyclic nucleic acid scaffold modification
  modified_base 22: mod_base = OTHER; note = misc_feature - bicyclic nucleic acid scaffold modification
  source 1..22: mol_type = other RNA
ttcttgtacttcatcccactga

SEQ ID NO: 5204 - RNA, 22 nt, synthetic construct
  modified_base 1: mod_base = OTHER; note = thymine
  misc_feature 1..22: note = Antisense oligonucleotide
  modified_base 1: mod_base = OTHER; note = misc_feature - bicyclic nucleic acid scaffold modification
  modified_base 9: mod_base = OTHER; note = misc_feature - bicyclic nucleic acid scaffold modification
  modified_base 22: mod_base = OTHER; note = misc_feature - bicyclic nucleic acid scaffold modification
  source 1..22: mol_type = other RNA
ttcttgtacttcatcccactga

SEQ ID NO: 5205 - RNA, 22 nt, synthetic construct
  modified_base 1: mod_base = OTHER; note = thymine
  misc_feature 1..22: note = Antisense oligonucleotide
  modified_base 1: mod_base = OTHER; note = misc_feature - bicyclic nucleic acid scaffold modification
  modified_base 12: mod_base = OTHER; note = misc_feature - bicyclic nucleic acid scaffold modification
  modified_base 22: mod_base = OTHER; note = misc_feature - bicyclic nucleic acid scaffold modification
  source 1..22: mol_type = other RNA
ttcttgtacttcatcccactga

SEQ ID NO: 5206 - RNA, 22 nt, synthetic construct
  modified_base 1: mod_base = OTHER; note = thymine
  misc_feature 1..22: note = Antisense oligonucleotide
  modified_base 1: mod_base = OTHER; note = misc_feature - bicyclic nucleic acid scaffold modification
  modified_base 19: mod_base = OTHER; note = misc_feature - bicyclic nucleic acid scaffold modification
  modified_base 22: mod_base = OTHER; note = misc_feature - bicyclic nucleic acid scaffold modification
  source 1..22: mol_type = other RNA
ttcttgtacttcatcccactga

SEQ ID NO: 5207 - RNA, 22 nt, synthetic construct
  modified_base 1: mod_base = OTHER; note = thymine
  misc_feature 1..22: note = Antisense oligonucleotide
  modified_base 1: mod_base = OTHER; note = misc_feature - bicyclic nucleic acid scaffold modification
  modified_base 3: mod_base = OTHER; note = misc_feature - bicyclic nucleic acid scaffold modification
  modified_base 9: mod_base = OTHER; note = misc_feature - bicyclic nucleic acid scaffold modification
  modified_base 22: mod_base = OTHER; note = misc_feature - bicyclic nucleic acid scaffold modification
  source 1..22: mol_type = other RNA
ttcttgtacttcatcccactga

SEQ ID NO: 5208 - RNA, 22 nt, synthetic construct
  modified_base 1: mod_base = OTHER; note = thymine
  misc_feature 1..22: note = Antisense oligonucleotide
  modified_base 1: mod_base = OTHER; note = misc_feature - bicyclic nucleic acid scaffold modification
  modified_base 6: mod_base = OTHER; note = misc_feature - bicyclic nucleic acid scaffold modification
  modified_base 12: mod_base = OTHER; note = misc_feature - bicyclic nucleic acid scaffold modification
  modified_base 22: mod_base = OTHER; note = misc_feature - bicyclic nucleic acid scaffold modification
  source 1..22: mol_type = other RNA
ttcttgtacttcatcccactga

SEQ ID NO: 5209 - RNA, 22 nt, synthetic construct
  modified_base 1: mod_base = OTHER; note = thymine
  misc_feature 1..22: note = Antisense oligonucleotide
  modified_base 1: mod_base = OTHER; note = misc_feature - bicyclic nucleic acid scaffold modification
  modified_base 6: mod_base = OTHER; note = misc_feature - bicyclic nucleic acid scaffold modification
  modified_base 19: mod_base = OTHER; note = misc_feature - bicyclic nucleic acid scaffold modification
  modified_base 22: mod_base = OTHER; note = misc_feature - bicyclic nucleic acid scaffold modification
  source 1..22: mol_type = other RNA
ttcttgtacttcatcccactga

SEQ ID NO: 5210 - RNA, 22 nt, synthetic construct
  modified_base 1: mod_base = OTHER; note = thymine
  misc_feature 1..22: note = Antisense oligonucleotide
  modified_base 1: mod_base = OTHER; note = misc_feature - bicyclic nucleic acid scaffold modification
  modified_base 9: mod_base = OTHER; note = misc_feature - bicyclic nucleic acid scaffold modification
  modified_base 12: mod_base = OTHER; note = misc_feature - bicyclic nucleic acid scaffold modification
  modified_base 21..22: mod_base = OTHER; note = misc_feature - bicyclic nucleic acid scaffold modification
  source 1..22: mol_type = other RNA
ttcttgtacttcatcccactga

SEQ ID NO: 5211 - RNA, 22 nt, synthetic construct
  modified_base 1..2: mod_base = OTHER; note = thymine
  misc_feature 1..22: note = Antisense oligonucleotide
  modified_base 1..2: mod_base = OTHER; note = misc_feature - bicyclic nucleic acid scaffold modification
  modified_base 21..22: mod_base = OTHER; note = misc_feature - bicyclic nucleic acid scaffold modification
  source 1..22: mol_type = other RNA
ttcttgtacttcatcccactga

SEQ ID NO: 5212 - RNA, 22 nt, synthetic construct
  modified_base 1..2: mod_base = OTHER; note = thymine
  misc_feature 1..22: note = Antisense oligonucleotide
  modified_base 1..2: mod_base = OTHER; note = misc_feature - bicyclic nucleic acid scaffold modification
  modified_base 6: mod_base = OTHER; note = misc_feature - bicyclic nucleic acid scaffold modification
  modified_base 19: mod_base = OTHER; note = misc_feature - bicyclic nucleic acid scaffold modification
  modified_base 21..22: mod_base = OTHER; note = misc_feature - bicyclic nucleic acid scaffold modification
  source 1..22: mol_type = other RNA
ttcttgtacttcatcccactga

SEQ ID NO: 5213 - RNA, 22 nt, synthetic construct
  modified_base 1..2: mod_base = OTHER; note = thymine
  misc_feature 1..22: note = Antisense oligonucleotide
  modified_base 1..2: mod_base = OTHER; note = misc_feature - bicyclic nucleic acid scaffold modification
  modified_base 6: mod_base = OTHER; note = misc_feature - bicyclic nucleic acid scaffold modification
  modified_base 21..22: mod_base = OTHER; note = misc_feature - bicyclic nucleic acid scaffold modification
  source 1..22: mol_type = other RNA
ttcttgtacttcatcccactga

SEQ ID NO: 5214 - RNA, 22 nt, synthetic construct
  modified_base 1: mod_base = OTHER; note = thymine
  modified_base 22: mod_base = OTHER; note = thymine
  misc_feature 1..22: note = Antisense oligonucleotide
  modified_base 1: mod_base = OTHER; note = misc_feature - bicyclic nucleic acid scaffold modification
  modified_base 22: mod_base = OTHER; note = misc_feature - bicyclic nucleic acid scaffold modification
  source 1..22: mol_type = other RNA
tcttgtacttcatcccactgat

SEQ ID NO: 5215 - RNA, 22 nt, synthetic construct
  modified_base 1: mod_base = OTHER; note = thymine
  modified_base 22: mod_base = OTHER; note = thymine
  misc_feature 1..22: note = Antisense oligonucleotide
  modified_base 1: mod_base = OTHER; note = misc_feature - bicyclic nucleic acid scaffold modification
  modified_base 5: mod_base = OTHER; note = misc_feature - bicyclic nucleic acid scaffold modification
  modified_base 22: mod_base = OTHER; note = misc_feature - bicyclic nucleic acid scaffold modification
  source 1..22: mol_type = other RNA
tcttgtacttcatcccactgat

SEQ ID NO: 5216 - RNA, 22 nt, synthetic construct
  modified_base 1: mod_base = OTHER; note = thymine
  modified_base 22: mod_base = OTHER; note = thymine
  misc_feature 1..22: note = Antisense oligonucleotide
  modified_base 1: mod_base = OTHER; note = misc_feature - bicyclic nucleic acid scaffold modification
  modified_base 8: mod_base = OTHER; note = misc_feature - bicyclic nucleic acid scaffold modification
  modified_base 22: mod_base = OTHER; note = misc_feature - bicyclic nucleic acid scaffold modification
  source 1..22: mol_type = other RNA
tcttgtacttcatcccactgat

SEQ ID NO: 5217 - RNA, 22 nt, synthetic construct
  modified_base 1: mod_base = OTHER; note = thymine
  modified_base 22: mod_base = OTHER; note = thymine
  misc_feature 1..22: note = Antisense oligonucleotide
  modified_base 1: mod_base = OTHER; note = misc_feature - bicyclic nucleic acid scaffold modification
  modified_base 11: mod_base = OTHER; note = misc_feature - bicyclic nucleic acid scaffold modification
  modified_base 22: mod_base = OTHER; note = misc_feature - bicyclic nucleic acid scaffold modification
  source 1..22: mol_type = other RNA
tcttgtacttcatcccactgat

SEQ ID NO: 5218 - RNA, 22 nt, synthetic construct
  modified_base 1: mod_base = OTHER; note = thymine
  modified_base 22: mod_base = OTHER; note = thymine
  misc_feature 1..22: note = Antisense oligonucleotide
  modified_base 1: mod_base = OTHER; note = misc_feature - bicyclic nucleic acid scaffold modification
  modified_base 18: mod_base = OTHER; note = misc_feature - bicyclic nucleic acid scaffold modification
  modified_base 22: mod_base = OTHER; note = misc_feature - bicyclic nucleic acid scaffold modification
  source 1..22: mol_type = other RNA
tcttgtacttcatcccactgat

SEQ ID NO: 5219 - RNA, 22 nt, synthetic construct
  modified_base 1: mod_base = OTHER; note = thymine
  modified_base 22: mod_base = OTHER; note = thymine
  misc_feature 1..22: note = Antisense oligonucleotide
  modified_base 1: mod_base = OTHER; note = misc_feature - bicyclic nucleic acid scaffold modification
  modified_base 20: mod_base = OTHER; note = misc_feature - bicyclic nucleic acid scaffold modification
  modified_base 22: mod_base = OTHER; note = misc_feature - bicyclic nucleic acid scaffold modification
  source 1..22: mol_type = other RNA
tcttgtacttcatcccactgat

SEQ ID NO: 5220 - RNA, 22 nt, synthetic construct
  modified_base 1: mod_base = OTHER; note = thymine
  modified_base 22: mod_base = OTHER; note = thymine
  misc_feature 1..22: note = Antisense oligonucleotide
  modified_base 1: mod_base = OTHER; note = misc_feature - bicyclic nucleic acid scaffold modification
  modified_base 5: mod_base = OTHER; note = misc_feature - bicyclic nucleic acid scaffold modification
  modified_base 20: mod_base = OTHER; note = misc_feature - bicyclic nucleic acid scaffold modification
  modified_base 22: mod_base = OTHER; note = misc_feature - bicyclic nucleic acid scaffold modification
  source 1..22: mol_type = other RNA
tcttgtacttcatcccactgat

SEQ ID NO: 5221 - RNA, 22 nt, synthetic construct
  modified_base 1: mod_base = OTHER; note = thymine
  modified_base 22: mod_base = OTHER; note = thymine
  misc_feature 1..22: note = Antisense oligonucleotide
  modified_base 1: mod_base = OTHER; note = misc_feature - bicyclic nucleic acid scaffold modification
  modified_base 8: mod_base = OTHER; note = misc_feature - bicyclic nucleic acid scaffold modification
  modified_base 18: mod_base = OTHER; note = misc_feature - bicyclic nucleic acid scaffold modification
  modified_base 22: mod_base = OTHER; note = misc_feature - bicyclic nucleic acid scaffold modification
  source 1..22: mol_type = other RNA
tcttgtacttcatcccactgat

SEQ ID NO: 5222 - RNA, 22 nt, synthetic construct
  modified_base 1: mod_base = OTHER; note = thymine
  modified_base 22: mod_base = OTHER; note = thymine
  misc_feature 1..22: note = Antisense oligonucleotide
  modified_base 1: mod_base = OTHER; note = misc_feature - bicyclic nucleic acid scaffold modification
  modified_base 5: mod_base = OTHER; note = misc_feature - bicyclic nucleic acid scaffold modification
  modified_base 11: mod_base = OTHER; note = misc_feature - bicyclic nucleic acid scaffold modification
  modified_base 22: mod_base = OTHER; note = misc_feature - bicyclic nucleic acid scaffold modification
  source 1..22: mol_type = other RNA
tcttgtacttcatcccactgat

SEQ ID NO: 5223 - RNA, 22 nt, synthetic construct
  modified_base 1: mod_base = OTHER; note = thymine
  modified_base 22: mod_base = OTHER; note = thymine
  misc_feature 1..22: note = Antisense oligonucleotide
  modified_base 1..2: mod_base = OTHER; note = misc_feature - bicyclic nucleic acid scaffold modification
  modified_base 21..22: mod_base = OTHER; note = misc_feature - bicyclic nucleic acid scaffold modification
  source 1..22: mol_type = other RNA
tcttgtacttcatcccactgat

SEQ ID NO: 5224 - RNA, 22 nt, synthetic construct
  modified_base 1: mod_base = OTHER; note = thymine
  modified_base 22: mod_base = OTHER; note = thymine
  misc_feature 1..22: note = Antisense oligonucleotide
  modified_base 1: mod_base = OTHER; note = misc_feature - bicyclic nucleic acid scaffold modification
  modified_base 5: mod_base = OTHER; note = misc_feature - bicyclic nucleic acid scaffold modification
  modified_base 11: mod_base = OTHER; note = misc_feature - bicyclic nucleic acid scaffold modification
  modified_base 21..22: mod_base = OTHER; note = misc_feature - bicyclic nucleic acid scaffold modification
  source 1..22: mol_type = other RNA
tcttgtacttcatcccactgat

SEQ ID NO: 5225 - RNA, 22 nt, synthetic construct
  modified_base 1: mod_base = OTHER; note = thymine
  modified_base 22: mod_base = OTHER; note = thymine
  misc_feature 1..22: note = Antisense oligonucleotide
  modified_base 1..2: mod_base = OTHER; note = misc_feature - bicyclic nucleic acid scaffold modification
  modified_base 5: mod_base = OTHER; note = misc_feature - bicyclic nucleic acid scaffold modification
  modified_base 22: mod_base = OTHER; note = misc_feature - bicyclic nucleic acid scaffold modification
  source 1..22: mol_type = other RNA
tcttgtacttcatcccactgat

SEQ ID NO: 5226 - RNA, 22 nt, synthetic construct
  modified_base 1: mod_base = OTHER; note = thymine
  modified_base 22: mod_base = OTHER; note = thymine
  misc_feature 1..22: note = Antisense oligonucleotide
  modified_base 1..2: mod_base = OTHER; note = misc_feature - bicyclic nucleic acid scaffold modification
  modified_base 8: mod_base = OTHER; note = misc_feature - bicyclic nucleic acid scaffold modification
  modified_base 11: mod_base = OTHER; note = misc_feature - bicyclic nucleic acid scaffold modification
  modified_base 21..22: mod_base = OTHER; note = misc_feature - bicyclic nucleic acid scaffold modification
  source 1..22: mol_type = other RNA
tcttgtacttcatcccactgat

SEQ ID NO: 5227 - RNA, 20 nt, synthetic construct
  misc_feature 1..20: note = Antisense oligonucleotide
  modified_base 1: mod_base = OTHER; note = misc_feature - bicyclic nucleic acid scaffold modification
  modified_base 20: mod_base = OTHER; note = misc_feature - bicyclic nucleic acid scaffold modification
  source 1..20: mol_type = other RNA
gttcttgtacttcatcccac

SEQ ID NO: 5228 - RNA, 20 nt, synthetic construct
  misc_feature 1..20: note = Antisense oligonucleotide
  modified_base 1: mod_base = OTHER; note = misc_feature - bicyclic nucleic acid scaffold modification
  modified_base 4: mod_base = OTHER; note = misc_feature - bicyclic nucleic acid scaffold modification
  modified_base 20: mod_base = OTHER; note = misc_feature - bicyclic nucleic acid scaffold modification
  source 1..20: mol_type = other RNA
gttcttgtacttcatcccac

SEQ ID NO: 5229 - RNA, 20 nt, synthetic construct
  misc_feature 1..20: note = Antisense oligonucleotide
  modified_base 1: mod_base = OTHER; note = misc_feature - bicyclic nucleic acid scaffold modification
  modified_base 7: mod_base = OTHER; note = misc_feature - bicyclic nucleic acid scaffold modification
  modified_base 20: mod_base = OTHER; note = misc_feature - bicyclic nucleic acid scaffold modification
  source 1..20: mol_type = other RNA
gttcttgtacttcatcccac

SEQ ID NO: 5230 - RNA, 20 nt, synthetic construct
  misc_feature 1..20: note = Antisense oligonucleotide
  modified_base 1: mod_base = OTHER; note = misc_feature - bicyclic nucleic acid scaffold modification
  modified_base 10: mod_base = OTHER; note = misc_feature - bicyclic nucleic acid scaffold modification
  modified_base 20: mod_base = OTHER; note = misc_feature - bicyclic nucleic acid scaffold modification
  source 1..20: mol_type = other RNA
gttcttgtacttcatcccac

SEQ ID NO: 5231 - RNA, 20 nt, synthetic construct
  misc_feature 1..20: note = Antisense oligonucleotide
  modified_base 1: mod_base = OTHER; note = misc_feature - bicyclic nucleic acid scaffold modification
  modified_base 13: mod_base = OTHER; note = misc_feature - bicyclic nucleic acid scaffold modification
  modified_base 20: mod_base = OTHER; note = misc_feature - bicyclic nucleic acid scaffold modification
  source 1..20: mol_type = other RNA
gttcttgtacttcatcccac

SEQ ID NO: 5232 - RNA, 20 nt, synthetic construct
  misc_feature 1..20: note = Antisense oligonucleotide
  modified_base 1: mod_base = OTHER; note = misc_feature - bicyclic nucleic acid scaffold modification
  modified_base 4: mod_base = OTHER; note = misc_feature - bicyclic nucleic acid scaffold modification
  modified_base 10: mod_base = OTHER; note = misc_feature - bicyclic nucleic acid scaffold modification
  modified_base 20: mod_base = OTHER; note = misc_feature - bicyclic nucleic acid scaffold modification
  source 1..20: mol_type = other RNA
gttcttgtacttcatcccac

SEQ ID NO: 5233 - RNA, 20 nt, synthetic construct
  misc_feature 1..20: note = Antisense oligonucleotide
  modified_base 1: mod_base = OTHER; note = misc_feature - bicyclic nucleic acid scaffold modification
  modified_base 7: mod_base = OTHER; note = misc_feature - bicyclic nucleic acid scaffold modification
  modified_base 13: mod_base = OTHER; note = misc_feature - bicyclic nucleic acid scaffold modification
  modified_base 20: mod_base = OTHER; note = misc_feature - bicyclic nucleic acid scaffold modification
  source 1..20: mol_type = other RNA
gttcttgtacttcatcccac

SEQ ID NO: 5234 - RNA, 20 nt, synthetic construct
  misc_feature 1..20: note = Antisense oligonucleotide
  modified_base 1: mod_base = OTHER; note = misc_feature - bicyclic nucleic acid scaffold modification
  modified_base 4: mod_base = OTHER; note = misc_feature - bicyclic nucleic acid scaffold modification
  modified_base 13: mod_base = OTHER; note = misc_feature - bicyclic nucleic acid scaffold modification
  modified_base 20: mod_base = OTHER; note = misc_feature - bicyclic nucleic acid scaffold modification
  source 1..20: mol_type = other RNA
gttcttgtacttcatcccac

SEQ ID NO: 5235 - RNA, 20 nt, synthetic construct
  modified_base 2: mod_base = OTHER; note = thymine
  misc_feature 1..20: note = Antisense oligonucleotide
  modified_base 1..2: mod_base = OTHER; note = misc_feature - bicyclic nucleic acid scaffold modification
  modified_base 19..20: mod_base = OTHER; note = misc_feature - bicyclic nucleic acid scaffold modification
  source 1..20: mol_type = other RNA
gttcttgtacttcatcccac

SEQ ID NO: 5236 - RNA, 20 nt, synthetic construct
  modified_base 2: mod_base = OTHER; note = thymine
  misc_feature 1..20: note = Antisense oligonucleotide
  modified_base 1..2: mod_base = OTHER; note = misc_feature - bicyclic nucleic acid scaffold modification
  modified_base 7: mod_base = OTHER; note = misc_feature - bicyclic nucleic acid scaffold modification
  modified_base 13: mod_base = OTHER; note = misc_feature - bicyclic nucleic acid scaffold modification
  modified_base 19..20: mod_base = OTHER; note = misc_feature - bicyclic nucleic acid scaffold modification
  source 1..20: mol_type = other RNA
gttcttgtacttcatcccac

SEQ ID NO: 5237 - RNA, 20 nt, synthetic construct
  misc_feature 1..20: note = Antisense oligonucleotide
  modified_base 1: mod_base = OTHER; note = misc_feature - bicyclic nucleic acid scaffold modification
  modified_base 4: mod_base = OTHER; note = misc_feature - bicyclic nucleic acid scaffold modification
  modified_base 7: mod_base = OTHER; note = misc_feature - bicyclic nucleic acid scaffold modification
  modified_base 13: mod_base = OTHER; note = misc_feature - bicyclic nucleic acid scaffold modification
  modified_base 19..20: mod_base = OTHER; note = misc_feature - bicyclic nucleic acid scaffold modification
  source 1..20: mol_type = other RNA
gttcttgtacttcatcccac

SEQ ID NO: 5238 - RNA, 20 nt, synthetic construct
  modified_base 1: mod_base = OTHER; note = thymine
  modified_base 20: mod_base = OTHER; note = thymine
  misc_feature 1..20: note = Antisense oligonucleotide
  modified_base 1: mod_base = OTHER; note = misc_feature - bicyclic nucleic acid scaffold modification
  modified_base 20: mod_base = OTHER; note = misc_feature - bicyclic nucleic acid scaffold modification
  source 1..20: mol_type = other RNA
ttcttgtacttcatcccact

SEQ ID NO: 5239 - RNA, 20 nt, synthetic construct
  modified_base 1: mod_base = OTHER; note = thymine
  modified_base 20: mod_base = OTHER; note = thymine
  misc_feature 1..20: note = Antisense oligonucleotide
  modified_base 1: mod_base = OTHER; note = misc_feature - bicyclic nucleic acid scaffold modification
  modified_base 3: mod_base = OTHER; note = misc_feature - bicyclic nucleic acid scaffold modification
  modified_base 20: mod_base = OTHER; note = misc_feature - bicyclic nucleic acid scaffold modification
  source 1..20: mol_type = other RNA
ttcttgtacttcatcccact

SEQ ID NO: 5240 - RNA, 20 nt, synthetic construct
  modified_base 1: mod_base = OTHER; note = thymine
  modified_base 20: mod_base = OTHER; note = thymine
  misc_feature 1..20: note = Antisense oligonucleotide
  modified_base 1: mod_base = OTHER; note = misc_feature - bicyclic nucleic acid scaffold modification
  modified_base 6: mod_base = OTHER; note = misc_feature - bicyclic nucleic acid scaffold modification
  modified_base 20: mod_base = OTHER; note = misc_feature - bicyclic nucleic acid scaffold modification
  source 1..20: mol_type = other RNA
ttcttgtacttcatcccact

SEQ ID NO: 5241 - RNA, 20 nt, synthetic construct
  modified_base 1: mod_base = OTHER; note = thymine
  modified_base 20: mod_base = OTHER; note = thymine
  misc_feature 1..20: note = Antisense oligonucleotide
  modified_base 1: mod_base = OTHER; note = misc_feature - bicyclic nucleic acid scaffold modification
  modified_base 9: mod_base = OTHER; note = misc_feature - bicyclic nucleic acid scaffold modification
  modified_base 20: mod_base = OTHER; note = misc_feature - bicyclic nucleic acid scaffold modification
  source 1..20: mol_type = other RNA
ttcttgtacttcatcccact

SEQ ID NO: 5242 - RNA, 20 nt, synthetic construct
  modified_base 1: mod_base = OTHER; note = thymine
  modified_base 20: mod_base = OTHER; note = thymine
  misc_feature 1..20: note = Antisense oligonucleotide
  modified_base 1: mod_base = OTHER; note = misc_feature - bicyclic nucleic acid scaffold modification
  modified_base 12: mod_base = OTHER; note = misc_feature - bicyclic nucleic acid scaffold modification
  modified_base 20: mod_base = OTHER; note = misc_feature - bicyclic nucleic acid scaffold modification
  source 1..20: mol_type = other RNA
ttcttgtacttcatcccact

SEQ ID NO: 5243 - RNA, 20 nt, synthetic construct
  modified_base 1: mod_base = OTHER; note = thymine
  modified_base 20: mod_base = OTHER; note = thymine
  misc_feature 1..20: note = Antisense oligonucleotide
  modified_base 1: mod_base = OTHER; note = misc_feature - bicyclic nucleic acid scaffold modification
  modified_base 19..20: mod_base = OTHER; note = misc_feature - bicyclic nucleic acid scaffold modification
  source 1..20: mol_type = other RNA
ttcttgtacttcatcccact

SEQ ID NO: 5244 - RNA, 20 nt, synthetic construct
  modified_base 1: mod_base = OTHER; note = thymine
  modified_base 20: mod_base = OTHER; note = thymine
  misc_feature 1..20: note = Antisense oligonucleotide
  modified_base 1: mod_base = OTHER; note = misc_feature - bicyclic nucleic acid scaffold modification
  modified_base 6: mod_base = OTHER; note = misc_feature - bicyclic nucleic acid scaffold modification
  modified_base 19..20: mod_base = OTHER; note = misc_feature - bicyclic nucleic acid scaffold modification
  source 1..20: mol_type = other RNA
ttcttgtacttcatcccact

SEQ ID NO: 5245 - RNA, 20 nt, synthetic construct
  modified_base 1: mod_base = OTHER; note = thymine
  modified_base 20: mod_base = OTHER; note = thymine
  misc_feature 1..20: note = Antisense oligonucleotide
  modified_base 1: mod_base = OTHER; note = misc_feature - bicyclic nucleic acid scaffold modification
  modified_base 3: mod_base = OTHER; note = misc_feature - bicyclic nucleic acid scaffold modification
  modified_base 12: mod_base = OTHER; note = misc_feature - bicyclic nucleic acid scaffold modification
  modified_base 20: mod_base = OTHER; note = misc_feature - bicyclic nucleic acid scaffold modification
  source 1..20: mol_type = other RNA
ttcttgtacttcatcccact

SEQ ID NO: 5246 - RNA, 20 nt, synthetic construct
  modified_base 1: mod_base = OTHER; note = thymine
  modified_base 20: mod_base = OTHER; note = thymine
  misc_feature 1..20: note = Antisense oligonucleotide
  modified_base 1: mod_base = OTHER; note = misc_feature - bicyclic nucleic acid scaffold modification
  modified_base 3: mod_base = OTHER; note = misc_feature - bicyclic nucleic acid scaffold modification
  modified_base 12: mod_base = OTHER; note = misc_feature - bicyclic nucleic acid scaffold modification
  modified_base 19..20: mod_base = OTHER; note = misc_feature - bicyclic nucleic acid scaffold modification
  source 1..20: mol_type = other RNA
ttcttgtacttcatcccact

SEQ ID NO: 5247 - RNA, 20 nt, synthetic construct
  modified_base 1..2: mod_base = OTHER; note = thymine
  modified_base 20: mod_base = OTHER; note = thymine
  misc_feature 1..20: note = Antisense oligonucleotide
  modified_base 1..2: mod_base = OTHER; note = misc_feature - bicyclic nucleic acid scaffold modification
  modified_base 19..20: mod_base = OTHER; note = misc_feature - bicyclic nucleic acid scaffold modification
  source 1..20: mol_type = other RNA
ttcttgtacttcatcccact

SEQ ID NO: 5248 - RNA, 20 nt, synthetic construct
  modified_base 1..2: mod_base = OTHER; note = thymine
  modified_base 20: mod_base = OTHER; note = thymine
  misc_feature 1..20: note = Antisense oligonucleotide
  modified_base 1..2: mod_base = OTHER; note = misc_feature - bicyclic nucleic acid scaffold modification
  modified_base 6: mod_base = OTHER; note = misc_feature - bicyclic nucleic acid scaffold modification
  modified_base 12: mod_base = OTHER; note = misc_feature - bicyclic nucleic acid scaffold modification
  modified_base 19..20: mod_base = OTHER; note = misc_feature - bicyclic nucleic acid scaffold modification
  source 1..20: mol_type = other RNA
ttcttgtacttcatcccact

SEQ ID NO: 5249 - RNA, 20 nt, synthetic construct
  modified_base 1: mod_base = OTHER; note = thymine
  misc_feature 1..20: note = Antisense oligonucleotide
  modified_base 1: mod_base = OTHER; note = misc_feature - bicyclic nucleic acid scaffold modification
  modified_base 20: mod_base = OTHER; note = misc_feature - bicyclic nucleic acid scaffold modification
  source 1..20: mol_type = other RNA
tcttgtacttcatcccactg

SEQ ID NO: 5250 - RNA, 20 nt, synthetic construct
  modified_base 1: mod_base = OTHER; note = thymine
  misc_feature 1..20: note = Antisense oligonucleotide
  modified_base 1: mod_base = OTHER; note = misc_feature - bicyclic nucleic acid scaffold modification
  modified_base 5: mod_base = OTHER; note = misc_feature - bicyclic nucleic acid scaffold modification
  modified_base 20: mod_base = OTHER; note = misc_feature - bicyclic nucleic acid scaffold modification
  source 1..20: mol_type = other RNA
tcttgtacttcatcccactg

SEQ ID NO: 5251 - RNA, 20 nt, synthetic construct
  modified_base 1: mod_base = OTHER; note = thymine
  misc_feature 1..20: note = Antisense oligonucleotide
  modified_base 1: mod_base = OTHER; note = misc_feature - bicyclic nucleic acid scaffold modification
  modified_base 8: mod_base = OTHER; note = misc_feature - bicyclic nucleic acid scaffold modification
  modified_base 20: mod_base = OTHER; note = misc_feature - bicyclic nucleic acid scaffold modification
  source 1..20: mol_type = other RNA
tcttgtacttcatcccactg

SEQ ID NO: 5252 - RNA, 20 nt, synthetic construct
  modified_base 1: mod_base = OTHER; note = thymine
  misc_feature 1..20: note = Antisense oligonucleotide
  modified_base 1: mod_base = OTHER; note = misc_feature - bicyclic nucleic acid scaffold modification
  modified_base 11: mod_base = OTHER; note = misc_feature - bicyclic nucleic acid scaffold modification
  modified_base 20: mod_base = OTHER; note = misc_feature - bicyclic nucleic acid scaffold modification
  source 1..20: mol_type = other RNA
tcttgtacttcatcccactg

SEQ ID NO: 5253 - RNA, 20 nt, synthetic construct
  modified_base 1: mod_base = OTHER; note = thymine
  misc_feature 1..20: note = Antisense oligonucleotide
  modified_base 1: mod_base = OTHER; note = misc_feature - bicyclic nucleic acid scaffold modification
  modified_base 18: mod_base = OTHER; note = misc_feature - bicyclic nucleic acid scaffold modification
  modified_base 20: mod_base = OTHER; note = misc_feature - bicyclic nucleic acid scaffold modification
  source 1..20: mol_type = other RNA
tcttgtacttcatcccactg

SEQ ID NO: 5254 - RNA, 20 nt, synthetic construct
  modified_base 1: mod_base = OTHER; note = thymine
  modified_base 19: mod_base = OTHER; note = thymine
  misc_feature 1..20: note = Antisense oligonucleotide
  modified_base 1: mod_base = OTHER; note = misc_feature - bicyclic nucleic acid scaffold modification
  modified_base 11: mod_base = OTHER; note = misc_feature - bicyclic nucleic acid scaffold modification
  modified_base 19..20: mod_base = OTHER; note = misc_feature - bicyclic nucleic acid scaffold modification
  source 1..20: mol_type = other RNA
tcttgtacttcatcccactg

SEQ ID NO: 5255 - RNA, 20 nt, synthetic construct
  modified_base 1: mod_base = OTHER; note = thymine
  misc_feature 1..20: note = Antisense oligonucleotide
  modified_base 1: mod_base = OTHER; note = misc_feature - bicyclic nucleic acid scaffold modification
  modified_base 5: mod_base = OTHER; note = misc_feature - bicyclic nucleic acid scaffold modification
  modified_base 11: mod_base = OTHER; note = misc_feature - bicyclic nucleic acid scaffold modification
  modified_base 20: mod_base = OTHER; note = misc_feature - bicyclic nucleic acid scaffold modification
  source 1..20: mol_type = other RNA
tcttgtacttcatcccactg

SEQ ID NO: 5256 - RNA, 20 nt, synthetic construct
  modified_base 1: mod_base = OTHER; note = thymine
  misc_feature 1..20: note = Antisense oligonucleotide
  modified_base 1: mod_base = OTHER; note = misc_feature - bicyclic nucleic acid scaffold modification
  modified_base 5: mod_base = OTHER; note = misc_feature - bicyclic nucleic acid scaffold modification
  modified_base 18: mod_base = OTHER; note = misc_feature - bicyclic nucleic acid scaffold modification
  modified_base 20: mod_base = OTHER; note = misc_feature - bicyclic nucleic acid scaffold modification
  source 1..20: mol_type = other RNA
tcttgtacttcatcccactg

SEQ ID NO: 5257 - RNA, 20 nt, synthetic construct
  modified_base 1: mod_base = OTHER; note = thymine
  modified_base 19: mod_base = OTHER; note = thymine
  misc_feature 1..20: note = Antisense oligonucleotide
  modified_base 1..2: mod_base = OTHER; note = misc_feature - bicyclic nucleic acid scaffold modification
  modified_base 19..20: mod_base = OTHER; note = misc_feature - bicyclic nucleic acid scaffold modification
  source 1..20: mol_type = other RNA
tcttgtacttcatcccactg

SEQ ID NO: 5258 - RNA, 20 nt, synthetic construct
  modified_base 1: mod_base = OTHER; note = thymine
  modified_base 19: mod_base = OTHER; note = thymine
  misc_feature 1..20: note = Antisense oligonucleotide
  modified_base 1: mod_base = OTHER; note = misc_feature - bicyclic nucleic acid scaffold modification
  modified_base 5: mod_base = OTHER; note = misc_feature - bicyclic nucleic acid scaffold modification
  modified_base 11: mod_base = OTHER; note = misc_feature - bicyclic nucleic acid scaffold modification
  modified_base 19..20: mod_base = OTHER; note = misc_feature - bicyclic nucleic acid scaffold modification
  source 1..20: mol_type = other RNA
tcttgtacttcatcccactg

SEQ ID NO: 5259 - RNA, 20 nt, synthetic construct
  modified_base 1: mod_base = OTHER; note = thymine
  modified_base 19: mod_base = OTHER; note = thymine
  misc_feature 1..20: note = Antisense oligonucleotide
  modified_base 1: mod_base = OTHER; note = misc_feature - bicyclic nucleic acid scaffold modification
  modified_base 8: mod_base = OTHER; note = misc_feature - bicyclic nucleic acid scaffold modification
  modified_base 18..20: mod_base = OTHER; note = misc_feature - bicyclic nucleic acid scaffold modification
  source 1..20: mol_type = other RNA
tcttgtacttcatcccactg

SEQ ID NO: 5260 - RNA, 20 nt, synthetic construct
  misc_feature 1..20: note = Antisense oligonucleotide
  modified_base 1: mod_base = OTHER; note = misc_feature - bicyclic nucleic acid scaffold modification
  modified_base 20: mod_base = OTHER; note = misc_feature - bicyclic nucleic acid scaffold modification
  source 1..20: mol_type = other RNA
cttgtacttcatcccactga

SEQ ID NO: 5261 - RNA, 20 nt, synthetic construct
  misc_feature 1..20: note = Antisense oligonucleotide
  modified_base 1: mod_base = OTHER; note = misc_feature - bicyclic nucleic acid scaffold modification
  modified_base 4: mod_base = OTHER; note = misc_feature - bicyclic nucleic acid scaffold modification
  modified_base 20: mod_base = OTHER; note = misc_feature - bicyclic nucleic acid scaffold modification
  source 1..20: mol_type = other RNA
cttgtacttcatcccactga

SEQ ID NO: 5262 - RNA, 20 nt, synthetic construct
  misc_feature 1..20: note = Antisense oligonucleotide
  modified_base 1: mod_base = OTHER; note = misc_feature - bicyclic nucleic acid scaffold modification
  modified_base 7: mod_base = OTHER; note = misc_feature - bicyclic nucleic acid scaffold modification
  modified_base 20: mod_base = OTHER; note = misc_feature - bicyclic nucleic acid scaffold modification
  source 1..20: mol_type = other RNA
cttgtacttcatcccactga

SEQ ID NO: 5263 - RNA, 20 nt, synthetic construct
  misc_feature 1..20: note = Antisense oligonucleotide
  modified_base 1: mod_base = OTHER; note = misc_feature - bicyclic nucleic acid scaffold modification
  modified_base 10: mod_base = OTHER; note = misc_feature - bicyclic nucleic acid scaffold modification
  modified_base 20: mod_base = OTHER; note = misc_feature - bicyclic nucleic acid scaffold modification
  source 1..20: mol_type = other RNA
cttgtacttcatcccactga

SEQ ID NO: 5264 - RNA, 20 nt, synthetic construct
  misc_feature 1..20: note = Antisense oligonucleotide
  modified_base 1: mod_base = OTHER; note = misc_feature - bicyclic nucleic acid scaffold modification
  modified_base 17: mod_base = OTHER; note = misc_feature - bicyclic nucleic acid scaffold modification
  modified_base 20: mod_base = OTHER; note = misc_feature - bicyclic nucleic acid scaffold modification
  source 1..20: mol_type = other RNA
cttgtacttcatcccactga

SEQ ID NO: 5265 - RNA, 20 nt, synthetic construct
  misc_feature 1..20: note = Antisense oligonucleotide
  modified_base 1: mod_base = OTHER; note = misc_feature - bicyclic nucleic acid scaffold modification
  modified_base 4: mod_base = OTHER; note = misc_feature - bicyclic nucleic acid scaffold modification
  modified_base 10: mod_base = OTHER; note = misc_feature - bicyclic nucleic acid scaffold modification
  modified_base 20: mod_base = OTHER; note = misc_feature - bicyclic nucleic acid scaffold modification
  source 1..20: mol_type = other RNA
cttgtacttcatcccactga

SEQ ID NO: 5266 - RNA, 20 nt, synthetic construct
  misc_feature 1..20: note = Antisense oligonucleotide
  modified_base 1: mod_base = OTHER; note = misc_feature - bicyclic nucleic acid scaffold modification
  modified_base 7: mod_base = OTHER; note = misc_feature - bicyclic nucleic acid scaffold modification
  modified_base 17: mod_base = OTHER; note = misc_feature - bicyclic nucleic acid scaffold modification
  modified_base 20: mod_base = OTHER; note = misc_feature - bicyclic nucleic acid scaffold modification
  source 1..20: mol_type = other RNA
cttgtacttcatcccactga

SEQ ID NO: 5267 - RNA, 20 nt, synthetic construct
  misc_feature 1..20: note = Antisense oligonucleotide
  modified_base 1: mod_base = OTHER; note = misc_feature - bicyclic nucleic acid scaffold modification
  modified_base 4: mod_base = OTHER; note = misc_feature - bicyclic nucleic acid scaffold modification
  modified_base 19..20: mod_base = OTHER; note = misc_feature - bicyclic nucleic acid scaffold modification
  source 1..20: mol_type = other RNA
cttgtacttcatcccactga

SEQ ID NO: 5268 - RNA, 20 nt, synthetic construct
  modified_base 2: mod_base = OTHER; note = thymine
  misc_feature 1..20: note = Antisense oligonucleotide
  modified_base 1..2: mod_base = OTHER; note = misc_feature - bicyclic nucleic acid scaffold modification
  modified_base 19..20: mod_base = OTHER; note = misc_feature - bicyclic nucleic acid scaffold modification
  source 1..20: mol_type = other RNA
cttgtacttcatcccactga

SEQ ID NO: 5269 - RNA, 20 nt, synthetic construct
  misc_feature 1..20: note = Antisense oligonucleotide
  modified_base 1: mod_base = OTHER; note = misc_feature - bicyclic nucleic acid scaffold modification
  modified_base 10: mod_base = OTHER; note = misc_feature - bicyclic nucleic acid scaffold modification
  modified_base 19..20: mod_base = OTHER; note = misc_feature - bicyclic nucleic acid scaffold modification
  source 1..20: mol_type = other RNA
cttgtacttcatcccactga

SEQ ID NO: 5270 - RNA, 20 nt, synthetic construct
  modified_base 2: mod_base = OTHER; note = thymine
  misc_feature 1..20: note = Antisense oligonucleotide
  modified_base 1..2: mod_base = OTHER; note = misc_feature - bicyclic nucleic acid scaffold modification
  modified_base 7: mod_base = OTHER; note = misc_feature - bicyclic nucleic acid scaffold modification
  modified_base 17: mod_base = OTHER; note = misc_feature - bicyclic nucleic acid scaffold modification
  modified_base 19..20: mod_base = OTHER; note = misc_feature - bicyclic nucleic acid scaffold modification
  source 1..20: mol_type = other RNA
cttgtacttcatcccactga

SEQ ID NO: 5271 - RNA, 20 nt, synthetic construct
  modified_base 1: mod_base = OTHER; note = thymine
  modified_base 20: mod_base = OTHER; note = thymine
  misc_feature 1..20: note = Antisense oligonucleotide
  modified_base 1: mod_base = OTHER; note = misc_feature - bicyclic nucleic acid scaffold modification
  modified_base 20: mod_base = OTHER; note = misc_feature - bicyclic nucleic acid scaffold modification
  source 1..20: mol_type = other RNA
ttgtacttcatcccactgat

SEQ ID NO: 5272 - RNA, 20 nt, synthetic construct
  modified_base 1: mod_base = OTHER; note = thymine
  modified_base 20: mod_base = OTHER; note = thymine
  misc_feature 1..20: note = Antisense oligonucleotide
  modified_base 1: mod_base = OTHER; note = misc_feature - bicyclic nucleic acid scaffold modification
  modified_base 3: mod_base = OTHER; note = misc_feature - bicyclic nucleic acid scaffold modification
  modified_base 20: mod_base = OTHER; note = misc_feature - bicyclic nucleic acid scaffold modification
  source 1..20: mol_type = other RNA
ttgtacttcatcccactgat

SEQ ID NO: 5273 - RNA, 20 nt, synthetic construct
  modified_base 1: mod_base = OTHER; note = thymine
  modified_base 20: mod_base = OTHER; note = thymine
  misc_feature 1..20: note = Antisense oligonucleotide
  modified_base 1: mod_base = OTHER; note = misc_feature - bicyclic nucleic acid scaffold modification
  modified_base 6: mod_base = OTHER; note = misc_feature - bicyclic nucleic acid scaffold modification
  modified_base 20: mod_base = OTHER; note = misc_feature - bicyclic nucleic acid scaffold modification
  source 1..20: mol_type = other RNA
ttgtacttcatcccactgat

SEQ ID NO: 5274 - RNA, 20 nt, synthetic construct
  modified_base 1: mod_base = OTHER; note = thymine
  modified_base 20: mod_base = OTHER; note = thymine
  misc_feature 1..20: note = Antisense oligonucleotide
  modified_base 1: mod_base = OTHER; note = misc_feature - bicyclic nucleic acid scaffold modification
  modified_base 9: mod_base = OTHER; note = misc_feature - bicyclic nucleic acid scaffold modification
  modified_base 20: mod_base = OTHER; note = misc_feature - bicyclic nucleic acid scaffold modification
  source 1..20: mol_type = other RNA
ttgtacttcatcccactgat

SEQ ID NO: 5275 - RNA, 20 nt, synthetic construct
  modified_base 1: mod_base = OTHER; note = thymine
  modified_base 20: mod_base = OTHER; note = thymine
  misc_feature 1..20: note = Antisense oligonucleotide
  modified_base 1: mod_base = OTHER; note = misc_feature - bicyclic nucleic acid scaffold modification
  modified_base 16: mod_base = OTHER; note = misc_feature - bicyclic nucleic acid scaffold modification
  modified_base 20: mod_base = OTHER; note = misc_feature - bicyclic nucleic acid scaffold modification
  source 1..20: mol_type = other RNA
ttgtacttcatcccactgat

SEQ ID NO: 5276 - RNA, 20 nt, synthetic construct
  modified_base 1: mod_base = OTHER; note = thymine
  modified_base 20: mod_base = OTHER; note = thymine
  misc_feature 1..20: note = Antisense oligonucleotide
  modified_base 1: mod_base = OTHER; note = misc_feature - bicyclic nucleic acid scaffold modification
  modified_base 18: mod_base = OTHER; note = misc_feature - bicyclic nucleic acid scaffold modification
  modified_base 20: mod_base = OTHER; note = misc_feature - bicyclic nucleic acid scaffold modification
  source 1..20: mol_type = other RNA
ttgtacttcatcccactgat

SEQ ID NO: 5277 - RNA, 20 nt, synthetic construct
  modified_base 1: mod_base = OTHER; note = thymine
  modified_base 20: mod_base = OTHER; note = thymine
  misc_feature 1..20: note = Antisense oligonucleotide
  modified_base 1: mod_base = OTHER; note = misc_feature - bicyclic nucleic acid scaffold modification
  modified_base 3: mod_base = OTHER; note = misc_feature - bicyclic nucleic acid scaffold modification
  modified_base 18: mod_base = OTHER; note = misc_feature - bicyclic nucleic acid scaffold modification
  modified_base 20: mod_base = OTHER; note = misc_feature - bicyclic nucleic acid scaffold modification
  source 1..20: mol_type = other RNA
ttgtacttcatcccactgat

SEQ ID NO: 5278 - RNA, 20 nt, synthetic construct
  modified_base 1: mod_base = OTHER; note = thymine
  modified_base 20: mod_base = OTHER; note = thymine
  misc_feature 1..20: note = Antisense oligonucleotide
  modified_base 1: mod_base = OTHER; note = misc_feature - bicyclic nucleic acid scaffold modification
  modified_base 6: mod_base = OTHER; note = misc_feature - bicyclic nucleic acid scaffold modification
  modified_base 16: mod_base = OTHER; note = misc_feature - bicyclic nucleic acid scaffold modification
  modified_base 20: mod_base = OTHER; note = misc_feature - bicyclic nucleic acid scaffold modification
  source 1..20: mol_type = other RNA
ttgtacttcatcccactgat

SEQ ID NO: 5279 - RNA, 20 nt, synthetic construct
  modified_base 1: mod_base = OTHER; note = thymine
  modified_base 20: mod_base = OTHER; note = thymine
  misc_feature 1..20: note = Antisense oligonucleotide
  modified_base 1: mod_base = OTHER; note = misc_feature - bicyclic nucleic acid scaffold modification
  modified_base 9: mod_base = OTHER; note = misc_feature - bicyclic nucleic acid scaffold modification
  modified_base 16: mod_base = OTHER; note = misc_feature - bicyclic nucleic acid scaffold modification
  modified_base 20: mod_base = OTHER; note = misc_feature - bicyclic nucleic acid scaffold modification
  source 1..20: mol_type = other RNA
ttgtacttcatcccactgat

SEQ ID NO: 5280 - RNA, 20 nt, synthetic construct
  modified_base 1..2: mod_base = OTHER; note = thymine
  modified_base 20: mod_base = OTHER; note = thymine
  misc_feature 1..20: note = Antisense oligonucleotide
  modified_base 1..2: mod_base = OTHER; note = misc_feature - bicyclic nucleic acid scaffold modification
  modified_base 19..20: mod_base = OTHER; note = misc_feature - bicyclic nucleic acid scaffold modification
  source 1..20: mol_type = other RNA
ttgtacttcatcccactgat

SEQ ID NO: 5281 - RNA, 20 nt, synthetic construct
  modified_base 1: mod_base = OTHER; note = thymine
  modified_base 20: mod_base = OTHER; note = thymine
  misc_feature 1..20: note = Antisense oligonucleotide
  modified_base 1: mod_base = OTHER; note = misc_feature - bicyclic nucleic acid scaffold modification
  modified_base 3: mod_base = OTHER; note = misc_feature - bicyclic nucleic acid scaffold modification
  modified_base 9: mod_base = OTHER; note = misc_feature - bicyclic nucleic acid scaffold modification
  modified_base 18: mod_base = OTHER; note = misc_feature - bicyclic nucleic acid scaffold modification
  modified_base 20: mod_base = OTHER; note = misc_feature - bicyclic nucleic acid scaffold modification
  source 1..20: mol_type = other RNA
ttgtacttcatcccactgat

SEQ ID NO: 5282 - RNA, 18 nt, synthetic construct
  misc_feature 1..18: note = Antisense oligonucleotide
  modified_base 1: mod_base = OTHER; note = misc_feature - bicyclic nucleic acid scaffold modification
  modified_base 18: mod_base = OTHER; note = misc_feature - bicyclic nucleic acid scaffold modification
  source 1..18: mol_type = other RNA
gttcttgtacttcatccc

SEQ ID NO: 5283 - RNA, 18 nt, synthetic construct
  misc_feature 1..18: note = Antisense oligonucleotide
  modified_base 1: mod_base = OTHER; note = misc_feature - bicyclic nucleic acid scaffold modification
  modified_base 4: mod_base = OTHER; note = misc_feature - bicyclic nucleic acid scaffold modification
  modified_base 18: mod_base = OTHER; note = misc_feature - bicyclic nucleic acid scaffold modification
  source 1..18: mol_type = other RNA
gttcttgtacttcatccc

SEQ ID NO: 5284 - RNA, 18 nt, synthetic construct
  misc_feature 1..18: note = Antisense oligonucleotide
  modified_base 1: mod_base = OTHER; note = misc_feature - bicyclic nucleic acid scaffold modification
  modified_base 7: mod_base = OTHER; note = misc_feature - bicyclic nucleic acid scaffold modification
  modified_base 18: mod_base = OTHER; note = misc_feature - bicyclic nucleic acid scaffold modification
  source 1..18: mol_type = other RNA
gttcttgtacttcatccc

SEQ ID NO: 5285 - RNA, 18 nt, synthetic construct
  misc_feature 1..18: note = Antisense oligonucleotide
  modified_base 1: mod_base = OTHER; note = misc_feature - bicyclic nucleic acid scaffold modification
  modified_base 10: mod_base = OTHER; note = misc_feature - bicyclic nucleic acid scaffold modification
  modified_base 18: mod_base = OTHER; note = misc_feature - bicyclic nucleic acid scaffold modification
  source 1..18: mol_type = other RNA
gttcttgtacttcatccc

SEQ ID NO: 5286 - RNA, 18 nt, synthetic construct
  misc_feature 1..18: note = Antisense oligonucleotide
  modified_base 1: mod_base = OTHER; note = misc_feature - bicyclic nucleic acid scaffold modification
  modified_base 13: mod_base = OTHER; note = misc_feature - bicyclic nucleic acid scaffold modification
  modified_base 18: mod_base = OTHER; note = misc_feature - bicyclic nucleic acid scaffold modification
  source 1..18: mol_type = other RNA
gttcttgtacttcatccc

SEQ ID NO: 5287 - RNA, 18 nt, synthetic construct
  misc_feature 1..18: note = Antisense oligonucleotide
  modified_base 1: mod_base = OTHER; note = misc_feature - bicyclic nucleic acid scaffold modification
  modified_base 7: mod_base = OTHER; note = misc_feature - bicyclic nucleic acid scaffold modification
  modified_base 13: mod_base = OTHER; note = misc_feature - bicyclic nucleic acid scaffold modification
  modified_base 18: mod_base = OTHER; note = misc_feature - bicyclic nucleic acid scaffold modification
  source 1..18: mol_type = other RNA
gttcttgtacttcatccc

SEQ ID NO: 5288 - RNA, 18 nt, synthetic construct
  misc_feature 1..18: note = Antisense oligonucleotide
  modified_base 1: mod_base = OTHER; note = misc_feature - bicyclic nucleic acid scaffold modification
  modified_base 4: mod_base = OTHER; note = misc_feature - bicyclic nucleic acid scaffold modification
  modified_base 10: mod_base = OTHER; note = misc_feature - bicyclic nucleic acid scaffold modification
  modified_base 18: mod_base = OTHER; note = misc_feature - bicyclic nucleic acid scaffold modification
  source 1..18: mol_type = other RNA
gttcttgtacttcatccc

SEQ ID NO: 5289 - RNA, 18 nt, synthetic construct
  misc_feature 1..18: note = Antisense oligonucleotide
  modified_base 1: mod_base = OTHER; note = misc_feature - bicyclic nucleic acid scaffold modification
  modified_base 4: mod_base = OTHER; note = misc_feature - bicyclic nucleic acid scaffold modification
  modified_base 7: mod_base = OTHER; note = misc_feature - bicyclic nucleic acid scaffold modification
  modified_base 10: mod_base = OTHER; note = misc_feature - bicyclic nucleic acid scaffold modification
  modified_base 13: mod_base = OTHER; note = misc_feature - bicyclic nucleic acid scaffold modification
  modified_base 18: mod_base = OTHER; note = misc_feature - bicyclic nucleic acid scaffold modification
  source 1..18: mol_type = other RNA
gttcttgtacttcatccc

SEQ ID NO: 5290 - RNA, 18 nt, synthetic construct
  misc_feature 1..18: note = Antisense oligonucleotide
  modified_base 1: mod_base = OTHER; note = misc_feature - bicyclic nucleic acid scaffold modification
  modified_base 17..18: mod_base = OTHER; note = misc_feature - bicyclic nucleic acid scaffold modification
  source 1..18: mol_type = other RNA
gttcttgtacttcatccc

SEQ ID NO: 5291 - RNA, 18 nt, synthetic construct
  modified_base 2: mod_base = OTHER; note = thymine
  misc_feature 1..18: note = Antisense oligonucleotide
  modified_base 1..2: mod_base = OTHER; note = misc_feature - bicyclic nucleic acid scaffold modification
  modified_base 17..18: mod_base = OTHER; note = misc_feature - bicyclic nucleic acid scaffold modification
  source 1..18: mol_type = other RNA
gttcttgtacttcatccc

SEQ ID NO: 5292 - RNA, 18 nt, synthetic construct
  modified_base 2: mod_base = OTHER; note = thymine
  misc_feature 1..18: note = Antisense oligonucleotide
  modified_base 1..2: mod_base = OTHER; note = misc_feature - bicyclic nucleic acid scaffold modification
  modified_base 7: mod_base = OTHER; note = misc_feature - bicyclic nucleic acid scaffold modification
  modified_base 13: mod_base = OTHER; note = misc_feature - bicyclic nucleic acid scaffold modification
  modified_base 17..18: mod_base = OTHER; note = misc_feature - bicyclic nucleic acid scaffold modification
  source 1..18: mol_type = other RNA
gttcttgtacttcatccc

SEQ ID NO: 5293 - RNA, 18 nt, synthetic construct
  modified_base 1: mod_base = OTHER; note = thymine
  misc_feature 1..18: note = Antisense oligonucleotide
  modified_base 1: mod_base = OTHER; note = misc_feature - bicyclic nucleic acid scaffold modification
  modified_base 18: mod_base = OTHER; note = misc_feature - bicyclic nucleic acid scaffold modification
  source 1..18: mol_type = other RNA
ttcttgtacttcatccca

SEQ ID NO: 5294 - RNA, 18 nt, synthetic construct
  modified_base 1: mod_base = OTHER; note = thymine
  misc_feature 1..18: note = Antisense oligonucleotide
  modified_base 1: mod_base = OTHER; note = misc_feature - bicyclic nucleic acid scaffold modification
  modified_base 3: mod_base = OTHER; note = misc_feature - bicyclic nucleic acid scaffold modification
  modified_base 18: mod_base = OTHER; note = misc_feature - bicyclic nucleic acid scaffold modification
  source 1..18: mol_type = other RNA
ttcttgtacttcatccca

SEQ ID NO: 5295 - RNA, 18 nt, synthetic construct
  modified_base 1: mod_base = OTHER; note = thymine
  misc_feature 1..18: note = Antisense oligonucleotide
  modified_base 1: mod_base = OTHER; note = misc_feature - bicyclic nucleic acid scaffold modification
  modified_base 6: mod_base = OTHER; note = misc_feature - bicyclic nucleic acid scaffold modification
  modified_base 18: mod_base = OTHER; note = misc_feature - bicyclic nucleic acid scaffold modification
  source 1..18: mol_type = other RNA
ttcttgtacttcatccca

SEQ ID NO: 5296 - RNA, 18 nt, synthetic construct
  modified_base 1: mod_base = OTHER; note = thymine
  misc_feature 1..18: note = Antisense oligonucleotide
  modified_base 1: mod_base = OTHER; note = misc_feature - bicyclic nucleic acid scaffold modification
  modified_base 9: mod_base = OTHER; note = misc_feature - bicyclic nucleic acid scaffold modification
  modified_base 18: mod_base = OTHER; note = misc_feature - bicyclic nucleic acid scaffold modification
  source 1..18: mol_type = other RNA
ttcttgtacttcatccca

SEQ ID NO: 5297 - RNA, 18 nt, synthetic construct
  modified_base 1: mod_base = OTHER; note = thymine
  misc_feature 1..18: note = Antisense oligonucleotide
  modified_base 1: mod_base = OTHER; note = misc_feature - bicyclic nucleic acid scaffold modification
  modified_base 12: mod_base = OTHER; note = misc_feature - bicyclic nucleic acid scaffold modification
  modified_base 18: mod_base = OTHER; note = misc_feature - bicyclic nucleic acid scaffold modification
  source 1..18: mol_type = other RNA
ttcttgtacttcatccca

SEQ ID NO: 5298 - RNA, 18 nt, synthetic construct
  modified_base 1: mod_base = OTHER; note = thymine
  misc_feature 1..18: note = Antisense oligonucleotide
  modified_base 1: mod_base = OTHER; note = misc_feature - bicyclic nucleic acid scaffold modification
  modified_base 3: mod_base = OTHER; note = misc_feature - bicyclic nucleic acid scaffold modification
  modified_base 12: mod_base = OTHER; note = misc_feature - bicyclic nucleic acid scaffold modification
  modified_base 18: mod_base = OTHER; note = misc_feature - bicyclic nucleic acid scaffold modification
  source 1..18: mol_type = other RNA
ttcttgtacttcatccca

SEQ ID NO: 5299 - RNA, 18 nt, synthetic construct
  modified_base 1: mod_base = OTHER; note = thymine
  misc_feature 1..18: note = Antisense oligonucleotide
  modified_base 1: mod_base = OTHER; note = misc_feature - bicyclic nucleic acid scaffold modification
  modified_base 6: mod_base = OTHER; note = misc_feature - bicyclic nucleic acid scaffold modification
  modified_base 12: mod_base = OTHER; note = misc_feature - bicyclic nucleic acid scaffold modification
  modified_base 18: mod_base = OTHER; note = misc_feature - bicyclic nucleic acid scaffold modification
  source 1..18: mol_type = other RNA
ttcttgtacttcatccca

SEQ ID NO: 5300 - RNA, 18 nt, synthetic construct
  modified_base 1: mod_base = OTHER; note = thymine
  misc_feature 1..18: note = Antisense oligonucleotide
  modified_base 1: mod_base = OTHER; note = misc_feature - bicyclic nucleic acid scaffold modification
  modified_base 3: mod_base = OTHER; note = misc_feature - bicyclic nucleic acid scaffold modification
  modified_base 9: mod_base = OTHER; note = misc_feature - bicyclic nucleic acid scaffold modification
  modified_base 18: mod_base = OTHER; note = misc_feature - bicyclic nucleic acid scaffold modification
  source 1..18: mol_type = other RNA
ttcttgtacttcatccca

SEQ ID NO: 5301 - RNA, 18 nt, synthetic construct
  modified_base 1: mod_base = OTHER; note = thymine
  misc_feature 1..18: note = Antisense oligonucleotide
  modified_base 1: mod_base = OTHER; note = misc_feature - bicyclic nucleic acid scaffold modification
  modified_base 6: mod_base = OTHER; note = misc_feature - bicyclic nucleic acid scaffold modification
  modified_base 17..18: mod_base = OTHER; note = misc_feature - bicyclic nucleic acid scaffold modification
  source 1..18: mol_type = other RNA
ttcttgtacttcatccca

SEQ ID NO: 5302 - RNA, 18 nt, synthetic construct
  modified_base 1..2: mod_base = OTHER; note = thymine
  misc_feature 1..18: note = Antisense oligonucleotide
  modified_base 1..2: mod_base = OTHER; note = misc_feature - bicyclic nucleic acid scaffold modification
  modified_base 17..18: mod_base = OTHER; note = misc_feature - bicyclic nucleic acid scaffold modification
  source 1..18: mol_type = other RNA
ttcttgtacttcatccca

SEQ ID NO: 5303 - RNA, 18 nt, synthetic construct
  modified_base 1: mod_base = OTHER; note = thymine
  misc_feature 1..18: note = Antisense oligonucleotide
  modified_base 1..2: mod_base = OTHER; note = misc_feature - bicyclic nucleic acid scaffold modification
  modified_base 6: mod_base = OTHER; note = misc_feature - bicyclic nucleic acid scaffold modification
  modified_base 12: mod_base = OTHER; note = misc_feature - bicyclic nucleic acid scaffold modification
  modified_base 17..18: mod_base = OTHER; note = misc_feature - bicyclic nucleic acid scaffold modification
  source 1..18: mol_type = other RNA
ttcttgtacttcatccca

SEQ ID NO: 5304 - RNA, 18 nt, synthetic construct
  modified_base 1: mod_base = OTHER; note = thymine
  misc_feature 1..18: note = Antisense oligonucleotide
  modified_base 1: mod_base = OTHER; note = misc_feature - bicyclic nucleic acid scaffold modification
  modified_base 18: mod_base = OTHER; note = misc_feature - bicyclic nucleic acid scaffold modification
  source 1..18: mol_type = other RNA
tcttgtacttcatcccac

SEQ ID NO: 5305 - RNA, 18 nt, synthetic construct
  modified_base 1: mod_base = OTHER; note = thymine
  misc_feature 1..18: note = Antisense oligonucleotide
  modified_base 1: mod_base = OTHER; note = misc_feature - bicyclic nucleic acid scaffold modification
  modified_base 5: mod_base = OTHER; note = misc_feature - bicyclic nucleic acid scaffold modification
  modified_base 18: mod_base = OTHER; note = misc_feature - bicyclic nucleic acid scaffold modification
  source 1..18: mol_type = other RNA
tcttgtacttcatcccac

SEQ ID NO: 5306 - RNA, 18 nt, synthetic construct
  modified_base 1: mod_base = OTHER; note = thymine
  misc_feature 1..18: note = Antisense oligonucleotide
  modified_base 1: mod_base = OTHER; note = misc_feature - bicyclic nucleic acid scaffold modification
  modified_base 8: mod_base = OTHER; note = misc_feature - bicyclic nucleic acid scaffold modification
  modified_base 18: mod_base = OTHER; note = misc_feature - bicyclic nucleic acid scaffold modification
  source 1..18: mol_type = other RNA
tcttgtacttcatcccac

SEQ ID NO: 5307 - RNA, 18 nt, synthetic construct
  modified_base 1: mod_base = OTHER; note = thymine
  misc_feature 1..18: note = Antisense oligonucleotide
  modified_base 1: mod_base = OTHER; note = misc_feature - bicyclic nucleic acid scaffold modification
  modified_base 11: mod_base = OTHER; note = misc_feature - bicyclic nucleic acid scaffold modification
  modified_base 18: mod_base = OTHER; note = misc_feature - bicyclic nucleic acid scaffold modification
  source 1..18: mol_type = other RNA
tcttgtacttcatcccac

SEQ ID NO: 5308 - RNA, 18 nt, synthetic construct
  modified_base 1: mod_base = OTHER; note = thymine
  misc_feature 1..18: note = Antisense oligonucleotide
  modified_base 1: mod_base = OTHER; note = misc_feature - bicyclic nucleic acid scaffold modification
  modified_base 5: mod_base = OTHER; note = misc_feature - bicyclic nucleic acid scaffold modification
  modified_base 11: mod_base = OTHER; note = misc_feature - bicyclic nucleic acid scaffold modification
  modified_base 18: mod_base = OTHER; note = misc_feature - bicyclic nucleic acid scaffold modification
  source 1..18: mol_type = other RNA
tcttgtacttcatcccac

SEQ ID NO: 5309 - RNA, 18 nt, synthetic construct
  modified_base 1: mod_base = OTHER; note = thymine
  misc_feature 1..18: note = Antisense oligonucleotide
  modified_base 1..2: mod_base = OTHER; note = misc_feature - bicyclic nucleic acid scaffold modification
  modified_base 18: mod_base = OTHER; note = misc_feature - bicyclic nucleic acid scaffold modification
  source 1..18: mol_type = other RNA
tcttgtacttcatcccac

SEQ ID NO: 5310 - RNA, 18 nt, synthetic construct
  modified_base 1: mod_base = OTHER; note = thymine
  misc_feature 1..18: note = Antisense oligonucleotide
  modified_base 1..2: mod_base = OTHER; note = misc_feature - bicyclic nucleic acid scaffold modification
  modified_base 8: mod_base = OTHER; note = misc_feature - bicyclic nucleic acid scaffold modification
  modified_base 18: mod_base = OTHER; note = misc_feature - bicyclic nucleic acid scaffold modification
  source 1..18: mol_type = other RNA
tcttgtacttcatcccac

SEQ ID NO: 5311 - RNA, 18 nt, synthetic construct
  modified_base 1: mod_base = OTHER; note = thymine
  misc_feature 1..18: note = Antisense oligonucleotide
  modified_base 1..2: mod_base = OTHER; note = misc_feature - bicyclic nucleic acid scaffold modification
  modified_base 11: mod_base = OTHER; note = misc_feature - bicyclic nucleic acid scaffold modification
  modified_base 18: mod_base = OTHER; note = misc_feature - bicyclic nucleic acid scaffold modification
  source 1..18: mol_type = other RNA
tcttgtacttcatcccac

SEQ ID NO: 5312 - RNA, 18 nt, synthetic construct
  modified_base 1: mod_base = OTHER; note = thymine
  misc_feature 1..18: note = Antisense oligonucleotide
  modified_base 1: mod_base = OTHER; note = misc_feature - bicyclic nucleic acid scaffold modification
  modified_base 8: mod_base = OTHER; note = misc_feature - bicyclic nucleic acid scaffold modification
  modified_base 17..18: mod_base = OTHER; note = misc_feature - bicyclic nucleic acid scaffold modification
  source 1..18: mol_type = other RNA
tcttgtacttcatcccac

SEQ ID NO: 5313 - RNA, 18 nt, synthetic construct
  modified_base 1: mod_base = OTHER; note = thymine
  misc_feature 1..18: note = Antisense oligonucleotide
  modified_base 1..2: mod_base = OTHER; note = misc_feature - bicyclic nucleic acid scaffold modification
  modified_base 17..18: mod_base = OTHER; note = misc_feature - bicyclic nucleic acid scaffold modification
  source 1..18: mol_type = other RNA
tcttgtacttcatcccac

SEQ ID NO: 5314 - RNA, 18 nt, synthetic construct
  modified_base 1: mod_base = OTHER; note = thymine
  misc_feature 1..18: note = Antisense oligonucleotide
  modified_base 1: mod_base = OTHER; note = misc_feature - bicyclic nucleic acid scaffold modification
  modified_base 5: mod_base = OTHER; note = misc_feature - bicyclic nucleic acid scaffold modification
  modified_base 8: mod_base = OTHER; note = misc_feature - bicyclic nucleic acid scaffold modification
  modified_base 11: mod_base = OTHER; note = misc_feature - bicyclic nucleic acid scaffold modification
  modified_base 17..18: mod_base = OTHER; note = misc_feature - bicyclic nucleic acid scaffold modification
  source 1..18: mol_type = other RNA
tcttgtacttcatcccac

SEQ ID NO: 5315 - RNA, 18 nt, synthetic construct
  modified_base 18: mod_base = OTHER; note = thymine
  misc_feature 1..18: note = Antisense oligonucleotide
  modified_base 1: mod_base = OTHER; note = misc_feature - bicyclic nucleic acid scaffold modification
  modified_base 18: mod_base = OTHER; note = misc_feature - bicyclic nucleic acid scaffold modification
  source 1..18: mol_type = other RNA
cttgtacttcatcccact

SEQ ID NO: 5316 - RNA, 18 nt, synthetic construct
  modified_base 18: mod_base = OTHER; note = thymine
  misc_feature 1..18: note = Antisense oligonucleotide
  modified_base 1: mod_base = OTHER; note = misc_feature - bicyclic nucleic acid scaffold modification
  modified_base 4: mod_base = OTHER; note = misc_feature - bicyclic nucleic acid scaffold modification
  modified_base 18: mod_base = OTHER; note = misc_feature - bicyclic nucleic acid scaffold modification
  source 1..18: mol_type = other RNA
cttgtacttcatcccact

SEQ ID NO: 5317 - RNA, 18 nt, synthetic construct
  modified_base 18: mod_base = OTHER; note = thymine
  misc_feature 1..18: note = Antisense oligonucleotide
  modified_base 1: mod_base = OTHER; note = misc_feature - bicyclic nucleic acid scaffold modification
  modified_base 7: mod_base = OTHER; note = misc_feature - bicyclic nucleic acid scaffold modification
  modified_base 18: mod_base = OTHER; note = misc_feature - bicyclic nucleic acid scaffold modification
  source 1..18: mol_type = other RNA
cttgtacttcatcccact

SEQ ID NO: 5318 - RNA, 18 nt, synthetic construct
  modified_base 18: mod_base = OTHER; note = thymine
  misc_feature 1..18: note = Antisense oligonucleotide
  modified_base 1: mod_base = OTHER; note = misc_feature - bicyclic nucleic acid scaffold modification
  modified_base 10: mod_base = OTHER; note = misc_feature - bicyclic nucleic acid scaffold modification
  modified_base 18: mod_base = OTHER; note = misc_feature - bicyclic nucleic acid scaffold modification
  source 1..18: mol_type = other RNA
cttgtacttcatcccact

SEQ ID NO: 5319 - RNA, 18 nt, synthetic construct
  modified_base 18: mod_base = OTHER; note = thymine
  misc_feature 1..18: note = Antisense oligonucleotide
  modified_base 1: mod_base = OTHER; note = misc_feature - bicyclic nucleic acid scaffold modification
  modified_base 17..18: mod_base = OTHER; note = misc_feature - bicyclic nucleic acid scaffold modification
  source 1..18: mol_type = other RNA
cttgtacttcatcccact

SEQ ID NO: 5320 - RNA, 18 nt, synthetic construct
  modified_base 18: mod_base = OTHER; note = thymine
  misc_feature 1..18: note = Antisense oligonucleotide
  modified_base 1: mod_base = OTHER; note = misc_feature - bicyclic nucleic acid scaffold modification
  modified_base 4: mod_base = OTHER; note = misc_feature - bicyclic nucleic acid scaffold modification
  modified_base 10: mod_base = OTHER; note = misc_feature - bicyclic nucleic acid scaffold modification
  modified_base 18: mod_base = OTHER; note = misc_feature - bicyclic nucleic acid scaffold modification
  source 1..18: mol_type = other RNA
cttgtacttcatcccact

SEQ ID NO: 5321 - RNA, 18 nt, synthetic construct
  modified_base 18: mod_base = OTHER; note = thymine
  misc_feature 1..18: note = Antisense oligonucleotide
  modified_base 1: mod_base = OTHER; note = misc_feature - bicyclic nucleic acid scaffold modification
  modified_base 7: mod_base = OTHER; note = misc_feature - bicyclic nucleic acid scaffold modification
  modified_base 17..18: mod_base = OTHER; note = misc_feature - bicyclic nucleic acid scaffold modification
  source 1..18: mol_type = other RNA
cttgtacttcatcccact

SEQ ID NO: 5322 - RNA, 18 nt, synthetic construct
  modified_base 2: mod_base = OTHER; note = thymine
  modified_base 18: mod_base = OTHER; note = thymine
  misc_feature 1..18: note = Antisense oligonucleotide
  modified_base 1..2: mod_base = OTHER; note = misc_feature - bicyclic nucleic acid scaffold modification
  modified_base 17..18: mod_base = OTHER; note = misc_feature - bicyclic nucleic acid scaffold modification
  source 1..18: mol_type = other RNA
cttgtacttcatcccact

SEQ ID NO: 5323 - RNA, 18 nt, synthetic construct
  modified_base 2: mod_base = OTHER; note = thymine
  modified_base 18: mod_base = OTHER; note = thymine
  misc_feature 1..18: note = Antisense oligonucleotide
  modified_base 1..2: mod_base = OTHER; note = misc_feature - bicyclic nucleic acid scaffold modification
  modified_base 7: mod_base = OTHER; note = misc_feature - bicyclic nucleic acid scaffold modification
  modified_base 10: mod_base = OTHER; note = misc_feature - bicyclic nucleic acid scaffold modification
  modified_base 17..18: mod_base = OTHER; note = misc_feature - bicyclic nucleic acid scaffold modification
  source 1..18: mol_type = other RNA
cttgtacttcatcccact

SEQ ID NO: 5324 - RNA, 18 nt, synthetic construct
  modified_base 2: mod_base = OTHER; note = thymine
  modified_base 18: mod_base = OTHER; note = thymine
  misc_feature 1..18: note = Antisense oligonucleotide
  modified_base 1..2: mod_base = OTHER; note = misc_feature - bicyclic nucleic acid scaffold modification
  modified_base 4: mod_base = OTHER; note = misc_feature - bicyclic nucleic acid scaffold modification
  modified_base 7: mod_base = OTHER; note = misc_feature - bicyclic nucleic acid scaffold modification
  modified_base 10: mod_base = OTHER; note = misc_feature - bicyclic nucleic acid scaffold modification
  modified_base 18: mod_base = OTHER; note = misc_feature - bicyclic nucleic acid scaffold modification
  source 1..18: mol_type = other RNA
cttgtacttcatcccact

SEQ ID NO: 5325 - RNA, 18 nt, synthetic construct
  modified_base 1: mod_base = OTHER; note = thymine
  misc_feature 1..18: note = Antisense oligonucleotide
  modified_base 1: mod_base = OTHER; note = misc_feature - bicyclic nucleic acid scaffold modification
  modified_base 18: mod_base = OTHER; note = misc_feature - bicyclic nucleic acid scaffold modification
  source 1..18: mol_type = other RNA
ttgtacttcatcccactg

SEQ ID NO: 5326 - RNA, 18 nt, synthetic construct
  modified_base 1: mod_base = OTHER; note = thymine
  misc_feature 1..18: note = Antisense oligonucleotide
  modified_base 1: mod_base = OTHER; note = misc_feature - bicyclic nucleic acid scaffold modification
  modified_base 3: mod_base = OTHER; note = misc_feature - bicyclic nucleic acid scaffold modification
  modified_base 18: mod_base = OTHER; note = misc_feature - bicyclic nucleic acid scaffold modification
  source 1..18: mol_type = other RNA
ttgtacttcatcccactg

SEQ ID NO: 5327 - RNA, 18 nt, synthetic construct
  modified_base 1: mod_base = OTHER; note = thymine
  misc_feature 1..18: note = Antisense oligonucleotide
  modified_base 1: mod_base = OTHER; note = misc_feature - bicyclic nucleic acid scaffold modification
  modified_base 6: mod_base = OTHER; note = misc_feature - bicyclic nucleic acid scaffold modification
  modified_base 18: mod_base = OTHER; note = misc_feature - bicyclic nucleic acid scaffold modification
  source 1..18: mol_type = other RNA
ttgtacttcatcccactg

SEQ ID NO: 5328 - RNA, 18 nt, synthetic construct
  modified_base 1: mod_base = OTHER; note = thymine
  misc_feature 1..18: note = Antisense oligonucleotide
  modified_base 1: mod_base = OTHER; note = misc_feature - bicyclic nucleic acid scaffold modification
  modified_base 9: mod_base = OTHER; note = misc_feature - bicyclic nucleic acid scaffold modification
  modified_base 18: mod_base = OTHER; note = misc_feature - bicyclic nucleic acid scaffold modification
  source 1..18: mol_type = other RNA
ttgtacttcatcccactg

SEQ ID NO: 5329 - RNA, 18 nt, synthetic construct
  modified_base 1: mod_base = OTHER; note = thymine
  misc_feature 1..18: note = Antisense oligonucleotide
  modified_base 1: mod_base = OTHER; note = misc_feature - bicyclic nucleic acid scaffold modification
  modified_base 16: mod_base = OTHER; note = misc_feature - bicyclic nucleic acid scaffold modification
  modified_base 18: mod_base = OTHER; note = misc_feature - bicyclic nucleic acid scaffold modification
  source 1..18: mol_type = other RNA
ttgtacttcatcccactg

SEQ ID NO: 5330 - RNA, 18 nt, synthetic construct
  modified_base 1: mod_base = OTHER; note = thymine
  misc_feature 1..18: note = Antisense oligonucleotide
  modified_base 1: mod_base = OTHER; note = misc_feature - bicyclic nucleic acid scaffold modification
  modified_base 6: mod_base = OTHER; note = misc_feature - bicyclic nucleic acid scaffold modification
  modified_base 16: mod_base = OTHER; note = misc_feature - bicyclic nucleic acid scaffold modification
  modified_base 18: mod_base = OTHER; note = misc_feature - bicyclic nucleic acid scaffold modification
  source 1..18: mol_type = other RNA
ttgtacttcatcccactg

SEQ ID NO: 5331 - RNA, 18 nt, synthetic construct
  modified_base 1: mod_base = OTHER; note = thymine
  misc_feature 1..18: note = Antisense oligonucleotide
  modified_base 1: mod_base = OTHER; note = misc_feature - bicyclic nucleic acid scaffold modification
  modified_base 3: mod_base = OTHER; note = misc_feature - bicyclic nucleic acid scaffold modification
  modified_base 16: mod_base = OTHER; note = misc_feature - bicyclic nucleic acid scaffold modification
  modified_base 18: mod_base = OTHER; note = misc_feature - bicyclic nucleic acid scaffold modification
  source 1..18: mol_type = other RNA
ttgtacttcatcccactg

SEQ ID NO: 5332 - RNA, 18 nt, synthetic construct
  modified_base 1: mod_base = OTHER; note = thymine
  misc_feature 1..18: note = Antisense oligonucleotide
  modified_base 1: mod_base = OTHER; note = misc_feature - bicyclic nucleic acid scaffold modification
  modified_base 3: mod_base = OTHER; note = misc_feature - bicyclic nucleic acid scaffold modification
  modified_base 9: mod_base = OTHER; note = misc_feature - bicyclic nucleic acid scaffold modification
  modified_base 18: mod_base = OTHER; note = misc_feature - bicyclic nucleic acid scaffold modification
  source 1..18: mol_type = other RNA
ttgtacttcatcccactg

SEQ ID NO: 5333 - RNA, 18 nt, synthetic construct
  modified_base 1: mod_base = OTHER; note = thymine
  modified_base 17: mod_base = OTHER; note = thymine
  misc_feature 1..18: note = Antisense oligonucleotide
  modified_base 1: mod_base = OTHER; note = misc_feature - bicyclic nucleic acid scaffold modification
  modified_base 17..18: mod_base = OTHER; note = misc_feature - bicyclic nucleic acid scaffold modification
  source 1..18: mol_type = other RNA
ttgtacttcatcccactg

SEQ ID NO: 5334 - RNA, 18 nt, synthetic construct
  modified_base 1..2: mod_base = OTHER; note = thymine
  modified_base 17: mod_base = OTHER; note = thymine
  misc_feature 1..18: note = Antisense oligonucleotide
  modified_base 1..2: mod_base = OTHER; note = misc_feature - bicyclic nucleic acid scaffold modification
  modified_base 9: mod_base = OTHER; note = misc_feature - bicyclic nucleic acid scaffold modification
  modified_base 17..18: mod_base = OTHER; note = misc_feature - bicyclic nucleic acid scaffold modification
  source 1..18: mol_type = other RNA
ttgtacttcatcccactg

SEQ ID NO: 5335 - RNA, 18 nt, synthetic construct
  modified_base 1..2: mod_base = OTHER; note = thymine
  modified_base 17: mod_base = OTHER; note = thymine
  misc_feature 1..18: note = Antisense oligonucleotide
  modified_base 1..2: mod_base = OTHER; note = misc_feature - bicyclic nucleic acid scaffold modification
  modified_base 6: mod_base = OTHER; note = misc_feature - bicyclic nucleic acid scaffold modification
  modified_base 9: mod_base = OTHER; note = misc_feature - bicyclic nucleic acid scaffold modification
  modified_base 17..18: mod_base = OTHER; note = misc_feature - bicyclic nucleic acid scaffold modification
  source 1..18: mol_type = other RNA
ttgtacttcatcccactg

SEQ ID NO: 5336 - RNA, 18 nt, synthetic construct
  modified_base 1: mod_base = OTHER; note = thymine
  misc_feature 1..18: note = Antisense oligonucleotide
  modified_base 1: mod_base = OTHER; note = misc_feature - bicyclic nucleic acid scaffold modification
  modified_base 18: mod_base = OTHER; note = misc_feature - bicyclic nucleic acid scaffold modification
  source 1..18: mol_type = other RNA
tgtacttcatcccactga

SEQ ID NO: 5337 - RNA, 18 nt, synthetic construct
  modified_base 1: mod_base = OTHER; note = thymine
  misc_feature 1..18: note = Antisense oligonucleotide
  modified_base 1..2: mod_base = OTHER; note = misc_feature - bicyclic nucleic acid scaffold modification
  modified_base 18: mod_base = OTHER; note = misc_feature - bicyclic nucleic acid scaffold modification
  source 1..18: mol_type = other RNA
tgtacttcatcccactga

SEQ ID NO: 5338 - RNA, 18 nt, synthetic construct
  modified_base 1: mod_base = OTHER; note = thymine
  misc_feature 1..18: note = Antisense oligonucleotide
  modified_base 1: mod_base = OTHER; note = misc_feature - bicyclic nucleic acid scaffold modification
  modified_base 5: mod_base = OTHER; note = misc_feature - bicyclic nucleic acid scaffold modification
  modified_base 18: mod_base = OTHER; note = misc_feature - bicyclic nucleic acid scaffold modification
  source 1..18: mol_type = other RNA
tgtacttcatcccactga

SEQ ID NO: 5339 - RNA, 18 nt, synthetic construct
  modified_base 1: mod_base = OTHER; note = thymine
  misc_feature 1..18: note = Antisense oligonucleotide
  modified_base 1: mod_base = OTHER; note = misc_feature - bicyclic nucleic acid scaffold modification
  modified_base 8: mod_base = OTHER; note = misc_feature - bicyclic nucleic acid scaffold modification
  modified_base 18: mod_base = OTHER; note = misc_feature - bicyclic nucleic acid scaffold modification
  source 1..18: mol_type = other RNA
tgtacttcatcccactga

SEQ ID NO: 5340 - RNA, 18 nt, synthetic construct
  modified_base 1: mod_base = OTHER; note = thymine
  misc_feature 1..18: note = Antisense oligonucleotide
  modified_base 1: mod_base = OTHER; note = misc_feature - bicyclic nucleic acid scaffold modification
  modified_base 15: mod_base = OTHER; note = misc_feature - bicyclic nucleic acid scaffold modification
  modified_base 18: mod_base = OTHER; note = misc_feature - bicyclic nucleic acid scaffold modification
  source 1..18: mol_type = other RNA
tgtacttcatcccactga

SEQ ID NO: 5341 - RNA, 18 nt, synthetic construct
  modified_base 1: mod_base = OTHER; note = thymine
  misc_feature 1..18: note = Antisense oligonucleotide
  modified_base 1: mod_base = OTHER; note = misc_feature - bicyclic nucleic acid scaffold modification
  modified_base 17..18: mod_base = OTHER; note = misc_feature - bicyclic nucleic acid scaffold modification
  source 1..18: mol_type = other RNA
tgtacttcatcccactga

SEQ ID NO: 5342 - RNA, 18 nt, synthetic construct
  modified_base 1: mod_base = OTHER; note = thymine
  misc_feature 1..18: note = Antisense oligonucleotide
  modified_base 1: mod_base = OTHER; note = misc_feature - bicyclic nucleic acid scaffold modification
  modified_base 5: mod_base = OTHER; note = misc_feature - bicyclic nucleic acid scaffold modification
  modified_base 15: mod_base = OTHER; note = misc_feature - bicyclic nucleic acid scaffold modification
  modified_base 18: mod_base = OTHER; note = misc_feature - bicyclic nucleic acid scaffold modification
  source 1..18: mol_type = other RNA
tgtacttcatcccactga

SEQ ID NO: 5343 - RNA, 18 nt, synthetic construct
  modified_base 1: mod_base = OTHER; note = thymine
  misc_feature 1..18: note = Antisense oligonucleotide
  modified_base 1: mod_base = OTHER; note = misc_feature - bicyclic nucleic acid scaffold modification
  modified_base 8: mod_base = OTHER; note = misc_feature - bicyclic nucleic acid scaffold modification
  modified_base 15: mod_base = OTHER; note = misc_feature - bicyclic nucleic acid scaffold modification
  modified_base 18: mod_base = OTHER; note = misc_feature - bicyclic nucleic acid scaffold modification
  source 1..18: mol_type = other RNA
tgtacttcatcccactga

SEQ ID NO: 5344 - RNA, 18 nt, synthetic construct
  modified_base 1: mod_base = OTHER; note = thymine
  misc_feature 1..18: note = Antisense oligonucleotide
  modified_base 1..2: mod_base = OTHER; note = misc_feature - bicyclic nucleic acid scaffold modification
  modified_base 17..18: mod_base = OTHER; note = misc_feature - bicyclic nucleic acid scaffold modification
  source 1..18: mol_type = other RNA
tgtacttcatcccactga

SEQ ID NO: 5345 - RNA, 18 nt, synthetic construct
  modified_base 1: mod_base = OTHER; note = thymine
  misc_feature 1..18: note = Antisense oligonucleotide
  modified_base 1..2: mod_base = OTHER; note = misc_feature - bicyclic nucleic acid scaffold modification
  modified_base 8: mod_base = OTHER; note = misc_feature - bicyclic nucleic acid scaffold modification
  modified_base 17..18: mod_base = OTHER; note = misc_feature - bicyclic nucleic acid scaffold modification
  source 1..18: mol_type = other RNA
tgtacttcatcccactga

SEQ ID NO: 5346 - RNA, 18 nt, synthetic construct
  modified_base 1: mod_base = OTHER; note = thymine
  misc_feature 1..18: note = Antisense oligonucleotide
  modified_base 1: mod_base = OTHER; note = misc_feature - bicyclic nucleic acid scaffold modification
  modified_base 5: mod_base = OTHER; note = misc_feature - bicyclic nucleic acid scaffold modification
  modified_base 8: mod_base = OTHER; note = misc_feature - bicyclic nucleic acid scaffold modification
  modified_base 15: mod_base = OTHER; note = misc_feature - bicyclic nucleic acid scaffold modification
  modified_base 18: mod_base = OTHER; note = misc_feature - bicyclic nucleic acid scaffold modification
  source 1..18: mol_type = other RNA
tgtacttcatcccactga

SEQ ID NO: 5347 - RNA, 18 nt, synthetic construct
  modified_base 18: mod_base = OTHER; note = thymine
  misc_feature 1..18: note = Antisense oligonucleotide
  modified_base 1: mod_base = OTHER; note = misc_feature - bicyclic nucleic acid scaffold modification
  modified_base 18: mod_base = OTHER; note = misc_feature - bicyclic nucleic acid scaffold modification
  source 1..18: mol_type = other RNA
gtacttcatcccactgat

SEQ ID NO: 5348 - RNA, 18 nt, synthetic construct
  modified_base 18: mod_base = OTHER; note = thymine
  misc_feature 1..18: note = Antisense oligonucleotide
  modified_base 1: mod_base = OTHER; note = misc_feature - bicyclic nucleic acid scaffold modification
  modified_base 4: mod_base = OTHER; note = misc_feature - bicyclic nucleic acid scaffold modification
  modified_base 18: mod_base = OTHER; note = misc_feature - bicyclic nucleic acid scaffold modification
  source 1..18: mol_type = other RNA
gtacttcatcccactgat

SEQ ID NO: 5349 - RNA, 18 nt, synthetic construct
  modified_base 18: mod_base = OTHER; note = thymine
  misc_feature 1..18: note = Antisense oligonucleotide
  modified_base 1: mod_base = OTHER; note = misc_feature - bicyclic nucleic acid scaffold modification
  modified_base 7: mod_base = OTHER; note = misc_feature - bicyclic nucleic acid scaffold modification
  modified_base 18: mod_base = OTHER; note = misc_feature - bicyclic nucleic acid scaffold modification
  source 1..18: mol_type = other RNA
gtacttcatcccactgat

SEQ ID NO: 5350 - RNA, 18 nt, synthetic construct
  modified_base 18: mod_base = OTHER; note = thymine
  misc_feature 1..18: note = Antisense oligonucleotide
  modified_base 1: mod_base = OTHER; note = misc_feature - bicyclic nucleic acid scaffold modification
  modified_base 14: mod_base = OTHER; note = misc_feature - bicyclic nucleic acid scaffold modification
  modified_base 18: mod_base = OTHER; note = misc_feature - bicyclic nucleic acid scaffold modification
  source 1..18: mol_type = other RNA
gtacttcatcccactgat

SEQ ID NO: 5351 - RNA, 18 nt, synthetic construct
  modified_base 18: mod_base = OTHER; note = thymine
  misc_feature 1..18: note = Antisense oligonucleotide
  modified_base 1: mod_base = OTHER; note = misc_feature - bicyclic nucleic acid scaffold modification
  modified_base 16: mod_base = OTHER; note = misc_feature - bicyclic nucleic acid scaffold modification
  modified_base 18: mod_base = OTHER; note = misc_feature - bicyclic nucleic acid scaffold modification
  source 1..18: mol_type = other RNA
gtacttcatcccactgat

SEQ ID NO: 5352 - RNA, 18 nt, synthetic construct
  modified_base 18: mod_base = OTHER; note = thymine
  misc_feature 1..18: note = Antisense oligonucleotide
  modified_base 1: mod_base = OTHER; note = misc_feature - bicyclic nucleic acid scaffold modification
  modified_base 4: mod_base = OTHER; note = misc_feature - bicyclic nucleic acid scaffold modification
  modified_base 16: mod_base = OTHER; note = misc_feature - bicyclic nucleic acid scaffold modification
  modified_base 18: mod_base = OTHER; note = misc_feature - bicyclic nucleic acid scaffold modification
  source 1..18: mol_type = other RNA
gtacttcatcccactgat

SEQ ID NO: 5353 - RNA, 18 nt, synthetic construct
  modified_base 18: mod_base = OTHER; note = thymine
  misc_feature 1..18: note = Antisense oligonucleotide
  modified_base 1: mod_base = OTHER; note = misc_feature - bicyclic nucleic acid scaffold modification
  modified_base 7: mod_base = OTHER; note = misc_feature - bicyclic nucleic acid scaffold modification
  modified_base 14: mod_base = OTHER; note = misc_feature - bicyclic nucleic acid scaffold modification
  modified_base 18: mod_base = OTHER; note = misc_feature - bicyclic nucleic acid scaffold modification
  source 1..18: mol_type = other RNA
gtacttcatcccactgat

SEQ ID NO: 5354 - RNA, 18 nt, synthetic construct
  modified_base 18: mod_base = OTHER; note = thymine
  misc_feature 1..18: note = Antisense oligonucleotide
  modified_base 1: mod_base = OTHER; note = misc_feature - bicyclic nucleic acid scaffold modification
  modified_base 7: mod_base = OTHER; note = misc_feature - bicyclic nucleic acid scaffold modification
  modified_base 16: mod_base = OTHER; note = misc_feature - bicyclic nucleic acid scaffold modification
  modified_base 18: mod_base = OTHER; note = misc_feature - bicyclic nucleic acid scaffold modification
  source 1..18: mol_type = other RNA
gtacttcatcccactgat

SEQ ID NO: 5355 - RNA, 18 nt, synthetic construct
  modified_base 18: mod_base = OTHER; note = thymine
  misc_feature 1..18: note = Antisense oligonucleotide
  modified_base 1: mod_base = OTHER; note = misc_feature - bicyclic nucleic acid scaffold modification
  modified_base 4: mod_base = OTHER; note = misc_feature - bicyclic nucleic acid scaffold modification
  modified_base 7: mod_base = OTHER; note = misc_feature - bicyclic nucleic acid scaffold modification
  modified_base 18: mod_base = OTHER; note = misc_feature - bicyclic nucleic acid scaffold modification
  source 1..18: mol_type = other RNA
gtacttcatcccactgat

SEQ ID NO: 5356 - RNA, 18 nt, synthetic construct
  modified_base 2: mod_base = OTHER; note = thymine
  modified_base 18: mod_base = OTHER; note = thymine
  misc_feature 1..18: note = Antisense oligonucleotide
  modified_base 1..2: mod_base = OTHER; note = misc_feature - bicyclic nucleic acid scaffold modification
  modified_base 17..18: mod_base = OTHER; note = misc_feature - bicyclic nucleic acid scaffold modification
  source 1..18: mol_type = other RNA
gtacttcatcccactgat

SEQ ID NO: 5357 - RNA, 18 nt, synthetic construct
  modified_base 18: mod_base = OTHER; note = thymine
  misc_feature 1..18: note = Antisense oligonucleotide
  modified_base 1..2: mod_base = OTHER; note = misc_feature - bicyclic nucleic acid scaffold modification
  modified_base 10..12: mod_base = OTHER; note = misc_feature - bicyclic nucleic acid scaffold modification
  modified_base 17..18: mod_base = OTHER; note = misc_feature - bicyclic nucleic acid scaffold modification
  source 1..18: mol_type = other RNA
gtacttcatcccactgat

SEQ ID NO: 5358 - RNA, 16 nt, synthetic construct
  misc_feature 1..16: note = Antisense oligonucleotide
  modified_base 1: mod_base = OTHER; note = misc_feature - bicyclic nucleic acid scaffold modification
  modified_base 16: mod_base = OTHER; note = misc_feature - bicyclic nucleic acid scaffold modification
  source 1..16: mol_type = other RNA
gttcttgtacttcatc

SEQ ID NO: 5359 - RNA, 16 nt, synthetic construct
  misc_feature 1..16: note = Antisense oligonucleotide
  modified_base 1: mod_base = OTHER; note = misc_feature - bicyclic nucleic acid scaffold modification
  modified_base 4: mod_base = OTHER; note = misc_feature - bicyclic nucleic acid scaffold modification
  modified_base 16: mod_base = OTHER; note = misc_feature - bicyclic nucleic acid scaffold modification
  source 1..16: mol_type = other RNA
gttcttgtacttcatc

SEQ ID NO: 5360 - RNA, 16 nt, synthetic construct
  misc_feature 1..16: note = Antisense oligonucleotide
  modified_base 1: mod_base = OTHER; note = misc_feature - bicyclic nucleic acid scaffold modification
  modified_base 7: mod_base = OTHER; note = misc_feature - bicyclic nucleic acid scaffold modification
  modified_base 16: mod_base = OTHER; note = misc_feature - bicyclic nucleic acid scaffold modification
  source 1..16: mol_type = other RNA
gttcttgtacttcatc

SEQ ID NO: 5361 - RNA, 16 nt, synthetic construct
  misc_feature 1..16: note = Antisense oligonucleotide
  modified_base 1: mod_base = OTHER; note = misc_feature - bicyclic nucleic acid scaffold modification
  modified_base 10: mod_base = OTHER; note = misc_feature - bicyclic nucleic acid scaffold modification
  modified_base 16: mod_base = OTHER; note = misc_feature - bicyclic nucleic acid scaffold modification
  source 1..16: mol_type = other RNA
gttcttgtacttcatc

SEQ ID NO: 5362 - RNA, 16 nt, synthetic construct
  misc_feature 1..16: note = Antisense oligonucleotide
  modified_base 1: mod_base = OTHER; note = misc_feature - bicyclic nucleic acid scaffold modification
  modified_base 13: mod_base = OTHER; note = misc_feature - bicyclic nucleic acid scaffold modification
  modified_base 16: mod_base = OTHER; note = misc_feature - bicyclic nucleic acid scaffold modification
  source 1..16: mol_type = other RNA
gttcttgtacttcatc

SEQ ID NO: 5363 - RNA, 16 nt, synthetic construct
  misc_feature 1..16: note = Antisense oligonucleotide
  modified_base 1: mod_base = OTHER; note = misc_feature - bicyclic nucleic acid scaffold modification
  modified_base 16: mod_base = OTHER; note = misc_feature - bicyclic nucleic acid scaffold modification
  source 1..16: mol_type = other RNA
gttcttgtacttcatc

SEQ ID NO: 5364 - RNA, 16 nt, synthetic construct
  misc_feature 1..16: note = Antisense oligonucleotide
  modified_base 1: mod_base = OTHER; note = misc_feature - bicyclic nucleic acid scaffold modification
  modified_base 4: mod_base = OTHER; note = misc_feature - bicyclic nucleic acid scaffold modification
  modified_base 13: mod_base = OTHER; note = misc_feature - bicyclic nucleic acid scaffold modification
  modified_base 16: mod_base = OTHER; note = misc_feature - bicyclic nucleic acid scaffold modification
  source 1..16: mol_type = other RNA
gttcttgtacttcatc

SEQ ID NO: 5365 - RNA, 16 nt, synthetic construct
  misc_feature 1..16: note = Antisense oligonucleotide
  modified_base 1: mod_base = OTHER; note = misc_feature - bicyclic nucleic acid scaffold modification
  modified_base 7: mod_base = OTHER; note = misc_feature - bicyclic nucleic acid scaffold modification
  modified_base 13: mod_base = OTHER; note = misc_feature - bicyclic nucleic acid scaffold modification
  modified_base 16: mod_base = OTHER; note = misc_feature - bicyclic nucleic acid scaffold modification
  source 1..16: mol_type = other RNA
gttcttgtacttcatc

SEQ ID NO: 5366 - RNA, 16 nt, synthetic construct
  misc_feature 1..16: note = Antisense oligonucleotide
  modified_base 1: mod_base = OTHER; note = misc_feature - bicyclic nucleic acid scaffold modification
  modified_base 4: mod_base = OTHER; note = misc_feature - bicyclic nucleic acid scaffold modification
  modified_base 10: mod_base = OTHER; note = misc_feature - bicyclic nucleic acid scaffold modification
  modified_base 16: mod_base = OTHER; note = misc_feature - bicyclic nucleic acid scaffold modification
  source 1..16: mol_type = other RNA
gttcttgtacttcatc

SEQ ID NO: 5367 - RNA, 16 nt, synthetic construct
  modified_base 15: mod_base = OTHER; note = thymine
  misc_feature 1..16: note = Antisense oligonucleotide
  modified_base 1: mod_base = OTHER; note = misc_feature - bicyclic nucleic acid scaffold modification
  modified_base 7: mod_base = OTHER; note = misc_feature - bicyclic nucleic acid scaffold modification
  modified_base 15..16: mod_base = OTHER; note = misc_feature - bicyclic nucleic acid scaffold modification
  source 1..16: mol_type = other RNA
gttcttgtacttcatc

SEQ ID NO: 5368 - RNA, 16 nt, synthetic construct
  modified_base 15: mod_base = OTHER; note = thymine
  misc_feature 1..16: note = Antisense oligonucleotide
  modified_base 1: mod_base = OTHER; note = misc_feature - bicyclic nucleic acid scaffold modification
  modified_base 4: mod_base = OTHER; note = misc_feature - bicyclic nucleic acid scaffold modification
  modified_base 10: mod_base = OTHER; note = misc_feature - bicyclic nucleic acid scaffold modification
  modified_base 15..16: mod_base = OTHER; note = misc_feature - bicyclic nucleic acid scaffold modification
  source 1..16: mol_type = other RNA
gttcttgtacttcatc

SEQ ID NO: 5369 - RNA, 16 nt, synthetic construct
  modified_base 2: mod_base = OTHER; note = thymine
  modified_base 15: mod_base = OTHER; note = thymine
  misc_feature 1..16: note = Antisense oligonucleotide
  modified_base 1..2: mod_base = OTHER; note = misc_feature - bicyclic nucleic acid scaffold modification
  modified_base 15..16: mod_base = OTHER; note = misc_feature - bicyclic nucleic acid scaffold modification
  source 1..16: mol_type = other RNA
gttcttgtacttcatc

SEQ ID NO: 5370 - RNA, 16 nt, synthetic construct
  modified_base 1: mod_base = OTHER; note = thymine
  misc_feature 1..16: note = Antisense oligonucleotide
  modified_base 1: mod_base = OTHER; note = misc_feature - bicyclic nucleic acid scaffold modification
  modified_base 16: mod_base = OTHER; note = misc_feature - bicyclic nucleic acid scaffold modification
  source 1..16: mol_type = other RNA
ttcttgtacttcatcc

SEQ ID NO: 5371 - RNA, 16 nt, synthetic construct
  modified_base 1: mod_base = OTHER; note = thymine
  misc_feature 1..16: note = Antisense oligonucleotide
  modified_base 1: mod_base = OTHER; note = misc_feature - bicyclic nucleic acid scaffold modification
  modified_base 3: mod_base = OTHER; note = misc_feature - bicyclic nucleic acid scaffold modification
  modified_base 16: mod_base = OTHER; note = misc_feature - bicyclic nucleic acid scaffold modification
  source 1..16: mol_type = other RNA
ttcttgtacttcatcc

SEQ ID NO: 5372 - RNA, 16 nt, synthetic construct
  modified_base 1: mod_base = OTHER; note = thymine
  misc_feature 1..16: note = Antisense oligonucleotide
  modified_base 1: mod_base = OTHER; note = misc_feature - bicyclic nucleic acid scaffold modification
  modified_base 6: mod_base = OTHER; note = misc_feature - bicyclic nucleic acid scaffold modification
  modified_base 16: mod_base = OTHER; note = misc_feature - bicyclic nucleic acid scaffold modification
  source 1..16: mol_type = other RNA
ttcttgtacttcatcc

SEQ ID NO: 5373 - RNA, 16 nt, synthetic construct
  modified_base 1: mod_base = OTHER; note = thymine
  misc_feature 1..16: note = Antisense oligonucleotide
  modified_base 1: mod_base = OTHER; note = misc_feature - bicyclic nucleic acid scaffold modification
  modified_base 9: mod_base = OTHER; note = misc_feature - bicyclic nucleic acid scaffold modification
  modified_base 16: mod_base = OTHER; note = misc_feature - bicyclic nucleic acid scaffold modification
  source 1..16: mol_type = other RNA
ttcttgtacttcatcc

SEQ ID NO: 5374 - RNA, 16 nt, synthetic construct
  modified_base 1: mod_base = OTHER; note = thymine
  misc_feature 1..16: note = Antisense oligonucleotide
  modified_base 1: mod_base = OTHER; note = misc_feature - bicyclic nucleic acid scaffold modification
  modified_base 12: mod_base = OTHER; note = misc_feature - bicyclic nucleic acid scaffold modification
  modified_base 16: mod_base = OTHER; note = misc_feature - bicyclic nucleic acid scaffold modification
  source 1..16: mol_type = other RNA
ttcttgtacttcatcc

SEQ ID NO: 5375 - RNA, 16 nt, synthetic construct
  modified_base 1: mod_base = OTHER; note = thymine
  misc_feature 1..16: note = Antisense oligonucleotide
  modified_base 1: mod_base = OTHER; note = misc_feature - bicyclic nucleic acid scaffold modification
  modified_base 3: mod_base = OTHER; note = misc_feature - bicyclic nucleic acid scaffold modification
  modified_base 12: mod_base = OTHER; note = misc_feature - bicyclic nucleic acid scaffold modification
  modified_base 16: mod_base = OTHER; note = misc_feature - bicyclic nucleic acid scaffold modification
  source 1..16: mol_type = other RNA
ttcttgtacttcatcc

SEQ ID NO: 5376 - RNA, 16 nt, synthetic construct
  modified_base 1: mod_base = OTHER; note = thymine
  misc_feature 1..16: note = Antisense oligonucleotide
  modified_base 1: mod_base = OTHER; note = misc_feature - bicyclic nucleic acid scaffold modification
  modified_base 6: mod_base = OTHER; note = misc_feature - bicyclic nucleic acid scaffold modification
  modified_base 12: mod_base = OTHER; note = misc_feature - bicyclic nucleic acid scaffold modification
  modified_base 16: mod_base = OTHER; note = misc_feature - bicyclic nucleic acid scaffold modification
  source 1..16: mol_type = other RNA
ttcttgtacttcatcc

SEQ ID NO: 5377 - RNA, 16 nt, synthetic construct
  modified_base 1: mod_base = OTHER; note = thymine
  misc_feature 1..16: note = Antisense oligonucleotide
  modified_base 1: mod_base = OTHER; note = misc_feature - bicyclic nucleic acid scaffold modification
  modified_base 3: mod_base = OTHER; note = misc_feature - bicyclic nucleic acid scaffold modification
  modified_base 9: mod_base = OTHER; note = misc_feature - bicyclic nucleic acid scaffold modification
  modified_base 16: mod_base = OTHER; note = misc_feature - bicyclic nucleic acid scaffold modification
  source 1..16: mol_type = other RNA
ttcttgtacttcatcc

SEQ ID NO: 5378 - RNA, 16 nt, synthetic construct
  modified_base 1..2: mod_base = OTHER; note = thymine
  misc_feature 1..16: note = Antisense oligonucleotide
  modified_base 1..2: mod_base = OTHER; note = misc_feature - bicyclic nucleic acid scaffold modification
  modified_base 15..16: mod_base = OTHER; note = misc_feature - bicyclic nucleic acid scaffold modification
  source 1..16: mol_type = other RNA
ttcttgtacttcatcc

SEQ ID NO: 5379 - RNA, 16 nt, synthetic construct
  modified_base 1..2: mod_base = OTHER; note = thymine
  misc_feature 1..16: note = Antisense oligonucleotide
  modified_base 1..2: mod_base = OTHER; note = misc_feature - bicyclic nucleic acid scaffold modification
  modified_base 9: mod_base = OTHER; note = misc_feature - bicyclic nucleic acid scaffold modification
  modified_base 15..16: mod_base = OTHER; note = misc_feature - bicyclic nucleic acid scaffold modification
  source 1..16: mol_type = other RNA
ttcttgtacttcatcc

SEQ ID NO: 5380 - RNA, 16 nt, synthetic construct
  modified_base 1..2: mod_base = OTHER; note = thymine
  misc_feature 1..16: note = Antisense oligonucleotide
  modified_base 1..2: mod_base = OTHER; note = misc_feature - bicyclic nucleic acid scaffold modification
  modified_base 6: mod_base = OTHER; note = misc_feature - bicyclic nucleic acid scaffold modification
  modified_base 12: mod_base = OTHER; note = misc_feature - bicyclic nucleic acid scaffold modification
  modified_base 15..16: mod_base = OTHER; note = misc_feature - bicyclic nucleic acid scaffold modification
  source 1..16: mol_type = other RNA
ttcttgtacttcatcc

SEQ ID NO: 5381 - RNA, 16 nt, synthetic construct
  modified_base 1: mod_base = OTHER; note = thymine
  misc_feature 1..16: note = Antisense oligonucleotide
  modified_base 1: mod_base = OTHER; note = misc_feature - bicyclic nucleic acid scaffold modification
  modified_base 16: mod_base = OTHER; note = misc_feature - bicyclic nucleic acid scaffold modification
  source 1..16: mol_type = other RNA
tcttgtacttcatccc

SEQ ID NO: 5382 - RNA, 16 nt, synthetic construct
  modified_base 1: mod_base = OTHER; note = thymine
  misc_feature 1..16: note = Antisense oligonucleotide
  modified_base 1: mod_base = OTHER; note = misc_feature - bicyclic nucleic acid scaffold modification
  modified_base 5: mod_base = OTHER; note = misc_feature - bicyclic nucleic acid scaffold modification
  modified_base 16: mod_base = OTHER; note = misc_feature - bicyclic nucleic acid scaffold modification
  source 1..16: mol_type = other RNA
tcttgtacttcatccc

SEQ ID NO: 5383 - RNA, 16 nt, synthetic construct
  modified_base 1: mod_base = OTHER; note = thymine
  misc_feature 1..16: note = Antisense oligonucleotide
  modified_base 1: mod_base = OTHER; note = misc_feature - bicyclic nucleic acid scaffold modification
  modified_base 8: mod_base = OTHER; note = misc_feature - bicyclic nucleic acid scaffold modification
  modified_base 16: mod_base = OTHER; note = misc_feature - bicyclic nucleic acid scaffold modification
  source 1..16: mol_type = other RNA
tcttgtacttcatccc

SEQ ID NO: 5384 - RNA, 16 nt, synthetic construct
  modified_base 1: mod_base = OTHER; note = thymine
  misc_feature 1..16: note = Antisense oligonucleotide
  modified_base 1: mod_base = OTHER; note = misc_feature - bicyclic nucleic acid scaffold modification
  modified_base 11: mod_base = OTHER; note = misc_feature - bicyclic nucleic acid scaffold modification
  modified_base 16: mod_base = OTHER; note = misc_feature - bicyclic nucleic acid scaffold modification
  source 1..16: mol_type = other RNA
tcttgtacttcatccc

SEQ ID NO: 5385 - RNA, 16 nt, synthetic construct
  modified_base 1: mod_base = OTHER; note = thymine
  misc_feature 1..16: note = Antisense oligonucleotide
  modified_base 1: mod_base = OTHER; note = misc_feature - bicyclic nucleic acid scaffold modification
  modified_base 5: mod_base = OTHER; note = misc_feature - bicyclic nucleic acid scaffold modification
  modified_base 11: mod_base = OTHER; note = misc_feature - bicyclic nucleic acid scaffold modification
  modified_base 16: mod_base = OTHER; note = misc_feature - bicyclic nucleic acid scaffold modification
  source 1..16: mol_type = other RNA
tcttgtacttcatccc

SEQ ID NO: 5386 - RNA, 16 nt, synthetic construct
  modified_base 1: mod_base = OTHER; note = thymine
  misc_feature 1..16: note = Antisense oligonucleotide
  modified_base 1..2: mod_base = OTHER; note = misc_feature - bicyclic nucleic acid scaffold modification
  modified_base 8: mod_base = OTHER; note = misc_feature - bicyclic nucleic acid scaffold modification
  modified_base 16: mod_base = OTHER; note = misc_feature - bicyclic nucleic acid scaffold modification
  source 1..16: mol_type = other RNA
tcttgtacttcatccc

SEQ ID NO: 5387 - RNA, 16 nt, synthetic construct
  modified_base 1: mod_base = OTHER; note = thymine
  misc_feature 1..16: note = Antisense oligonucleotide
  modified_base 1: mod_base = OTHER; note = misc_feature - bicyclic nucleic acid scaffold modification
  modified_base 5: mod_base = OTHER; note = misc_feature - bicyclic nucleic acid scaffold modification
  modified_base 15..16: mod_base = OTHER; note = misc_feature - bicyclic nucleic acid scaffold modification
  source 1..16: mol_type = other RNA
tcttgtacttcatccc

SEQ ID NO: 5388 - RNA, 16 nt, synthetic construct
  modified_base 1: mod_base = OTHER; note = thymine
  misc_feature 1..16: note = Antisense oligonucleotide
  modified_base 1..2: mod_base = OTHER; note = misc_feature - bicyclic nucleic acid scaffold modification
  modified_base 15..16: mod_base = OTHER; note = misc_feature - bicyclic nucleic acid scaffold modification
  source 1..16: mol_type = other RNA
tcttgtacttcatccc

SEQ ID NO: 5389 - RNA, 16 nt, synthetic construct
  modified_base 1: mod_base = OTHER; note = thymine
  misc_feature 1..16: note = Antisense oligonucleotide
  modified_base 1..2: mod_base = OTHER; note = misc_feature - bicyclic nucleic acid scaffold modification
  modified_base 5: mod_base = OTHER; note = misc_feature - bicyclic nucleic acid scaffold modification
  modified_base 11: mod_base = OTHER; note = misc_feature - bicyclic nucleic acid scaffold modification
  modified_base 15..16: mod_base = OTHER; note = misc_feature - bicyclic nucleic acid scaffold modification
  source 1..16: mol_type = other RNA
tcttgtacttcatccc

SEQ ID NO: 5390 - RNA, 16 nt, synthetic construct
  misc_feature 1..16: note = Antisense oligonucleotide
  modified_base 1: mod_base = OTHER; note = misc_feature - bicyclic nucleic acid scaffold modification
  modified_base 16: mod_base = OTHER; note = misc_feature - bicyclic nucleic acid scaffold modification
  source 1..16: mol_type = other RNA
cttgtacttcatccca

SEQ ID NO: 5391 - RNA, 16 nt, synthetic construct
  misc_feature 1..16: note = Antisense oligonucleotide
  modified_base 1: mod_base = OTHER; note = misc_feature - bicyclic nucleic acid scaffold modification
  modified_base 4: mod_base = OTHER; note = misc_feature - bicyclic nucleic acid scaffold modification
  modified_base 16: mod_base = OTHER; note = misc_feature - bicyclic nucleic acid scaffold modification
  source 1..16: mol_type = other RNA
cttgtacttcatccca

SEQ ID NO: 5392 - RNA, 16 nt, synthetic construct
  misc_feature 1..16: note = Antisense oligonucleotide
  modified_base 1: mod_base = OTHER; note = misc_feature - bicyclic nucleic acid scaffold modification
  modified_base 7: mod_base = OTHER; note = misc_feature - bicyclic nucleic acid scaffold modification
  modified_base 16: mod_base = OTHER; note = misc_feature - bicyclic nucleic acid scaffold modification
  source 1..16: mol_type = other RNA
cttgtacttcatccca

SEQ ID NO: 5393 - RNA, 16 nt, synthetic construct
  misc_feature 1..16: note = Antisense oligonucleotide
  modified_base 1: mod_base = OTHER; note = misc_feature - bicyclic nucleic acid scaffold modification
  modified_base 10: mod_base = OTHER; note = misc_feature - bicyclic nucleic acid scaffold modification
  modified_base 16: mod_base = OTHER; note = misc_feature - bicyclic nucleic acid scaffold modification
  source 1..16: mol_type = other RNA
cttgtacttcatccca

SEQ ID NO: 5394 - RNA, 16 nt, synthetic construct
  misc_feature 1..16: note = Antisense oligonucleotide
  modified_base 1: mod_base = OTHER; note = misc_feature - bicyclic nucleic acid scaffold modification
  modified_base 4: mod_base = OTHER; note = misc_feature - bicyclic nucleic acid scaffold modification
  modified_base 10: mod_base = OTHER; note = misc_feature - bicyclic nucleic acid scaffold modification
  modified_base 16: mod_base = OTHER; note = misc_feature - bicyclic nucleic acid scaffold modification
  source 1..16: mol_type = other RNA
cttgtacttcatccca

SEQ ID NO: 5395 - RNA, 16 nt, synthetic construct
  misc_feature 1..16: note = Antisense oligonucleotide
  modified_base 1: mod_base = OTHER; note = misc_feature - bicyclic nucleic acid scaffold modification
  modified_base 7: mod_base = OTHER; note = misc_feature - bicyclic nucleic acid scaffold modification
  modified_base 10: mod_base = OTHER; note = misc_feature - bicyclic nucleic acid scaffold modification
  modified_base 16: mod_base = OTHER; note = misc_feature - bicyclic nucleic acid scaffold modification
  source 1..16: mol_type = other RNA
cttgtacttcatccca

SEQ ID NO: 5396 - RNA, 16 nt, synthetic construct
  misc_feature 1..16: note = Antisense oligonucleotide
  modified_base 1: mod_base = OTHER; note = misc_feature - bicyclic nucleic acid scaffold modification
  modified_base 4: mod_base = OTHER; note = misc_feature - bicyclic nucleic acid scaffold modification
  modified_base 15..16: mod_base = OTHER; note = misc_feature - bicyclic nucleic acid scaffold modification
  source 1..16: mol_type = other RNA
cttgtacttcatccca

SEQ ID NO: 5397 - RNA, 16 nt, synthetic construct
  modified_base 2: mod_base = OTHER; note = thymine
  misc_feature 1..16: note = Antisense oligonucleotide
  modified_base 1..2: mod_base = OTHER; note = misc_feature - bicyclic nucleic acid scaffold modification
  modified_base 15..16: mod_base = OTHER; note = misc_feature - bicyclic nucleic acid scaffold modification
  source 1..16: mol_type = other RNA
cttgtacttcatccca

SEQ ID NO: 5398 - RNA, 16 nt, synthetic construct
  modified_base 2: mod_base = OTHER; note = thymine
  misc_feature 1..16: note = Antisense oligonucleotide
  modified_base 1..2: mod_base = OTHER; note = misc_feature - bicyclic nucleic acid scaffold modification
  modified_base 7: mod_base = OTHER; note = misc_feature - bicyclic nucleic acid scaffold modification
  modified_base 10: mod_base = OTHER; note = misc_feature - bicyclic nucleic acid scaffold modification
  modified_base 15..16: mod_base = OTHER; note = misc_feature - bicyclic nucleic acid scaffold modification
  source 1..16: mol_type = other RNA
cttgtacttcatccca

SEQ ID NO: 5399 - RNA, 16 nt, synthetic construct
  modified_base 1: mod_base = OTHER; note = thymine
  misc_feature 1..16: note = Antisense oligonucleotide
  modified_base 1: mod_base = OTHER; note = misc_feature - bicyclic nucleic acid scaffold modification
  modified_base 16: mod_base = OTHER; note = misc_feature - bicyclic nucleic acid scaffold modification
  source 1..16: mol_type = other RNA
ttgtacttcatcccac

SEQ ID NO: 5400 - RNA, 16 nt, synthetic construct
  modified_base 1: mod_base = OTHER; note = thymine
  misc_feature 1..16: note = Antisense oligonucleotide
  modified_base 1: mod_base = OTHER; note = misc_feature - bicyclic nucleic acid scaffold modification
  modified_base 3: mod_base = OTHER; note = misc_feature - bicyclic nucleic acid scaffold modification
  modified_base 16: mod_base = OTHER; note = misc_feature - bicyclic nucleic acid scaffold modification
  source 1..16: mol_type = other RNA
ttgtacttcatcccac

SEQ ID NO: 5401 - RNA, 16 nt, synthetic construct
  modified_base 1: mod_base = OTHER; note = thymine
  misc_feature 1..16: note = Antisense oligonucleotide
  modified_base 1: mod_base = OTHER; note = misc_feature - bicyclic nucleic acid scaffold modification
  modified_base 6: mod_base = OTHER; note = misc_feature - bicyclic nucleic acid scaffold modification
  modified_base 16: mod_base = OTHER; note = misc_feature - bicyclic nucleic acid scaffold modification
  source 1..16: mol_type = other RNA
ttgtacttcatcccac

SEQ ID NO: 5402 - RNA, 16 nt, synthetic construct
  modified_base 1: mod_base = OTHER; note = thymine
  misc_feature 1..16: note = Antisense oligonucleotide
  modified_base 1: mod_base = OTHER; note = misc_feature - bicyclic nucleic acid scaffold modification
  modified_base 9: mod_base = OTHER; note = misc_feature - bicyclic nucleic acid scaffold modification
  modified_base 16: mod_base = OTHER; note = misc_feature - bicyclic nucleic acid scaffold modification
  source 1..16: mol_type = other RNA
ttgtacttcatcccac

SEQ ID NO: 5403 - RNA, 16 nt, synthetic construct
  modified_base 1: mod_base = OTHER; note = thymine
  misc_feature 1..16: note = Antisense oligonucleotide
  modified_base 1: mod_base = OTHER; note = misc_feature - bicyclic nucleic acid scaffold modification
  modified_base 3: mod_base = OTHER; note = misc_feature - bicyclic nucleic acid scaffold modification
  modified_base 9: mod_base = OTHER; note = misc_feature - bicyclic nucleic acid scaffold modification
  modified_base 16: mod_base = OTHER; note = misc_feature - bicyclic nucleic acid scaffold modification
  source 1..16: mol_type = other RNA
ttgtacttcatcccac

SEQ ID NO: 5404 - RNA, 16 nt, synthetic construct
  modified_base 1: mod_base = OTHER; note = thymine
  misc_feature 1..16: note = Antisense oligonucleotide
  modified_base 1: mod_base = OTHER; note = misc_feature - bicyclic nucleic acid scaffold modification
  modified_base 3: mod_base = OTHER; note = misc_feature - bicyclic nucleic acid scaffold modification
  modified_base 6: mod_base = OTHER; note = misc_feature - bicyclic nucleic acid scaffold modification
  modified_base 16: mod_base = OTHER; note = misc_feature - bicyclic nucleic acid scaffold modification
  source 1..16: mol_type = other RNA
ttgtacttcatcccac

SEQ ID NO: 5405 - RNA, 16 nt, synthetic construct
  modified_base 1: mod_base = OTHER; note = thymine
  misc_feature 1..16: note = Antisense oligonucleotide
  modified_base 1: mod_base = OTHER; note = misc_feature - bicyclic nucleic acid scaffold modification
  modified_base 6: mod_base = OTHER; note = misc_feature - bicyclic nucleic acid scaffold modification
  modified_base 9: mod_base = OTHER; note = misc_feature - bicyclic nucleic acid scaffold modification
  modified_base 16: mod_base = OTHER; note = misc_feature - bicyclic nucleic acid scaffold modification
  source 1..16: mol_type = other RNA
ttgtacttcatcccac

SEQ ID NO: 5406 - RNA, 16 nt, synthetic construct
  modified_base 1: mod_base = OTHER; note = thymine
  misc_feature 1..16: note = Antisense oligonucleotide
  modified_base 1: mod_base = OTHER; note = misc_feature - bicyclic nucleic acid scaffold modification
  modified_base 15..16: mod_base = OTHER; note = misc_feature - bicyclic nucleic acid scaffold modification
  source 1..16: mol_type = other RNA
ttgtacttcatcccac

SEQ ID NO: 5407 - RNA, 16 nt, synthetic construct
  modified_base 1..2: mod_base = OTHER; note = thymine
  misc_feature 1..16: note = Antisense oligonucleotide
  modified_base 1..2: mod_base = OTHER; note = misc_feature - bicyclic nucleic acid scaffold modification
  modified_base 9: mod_base = OTHER; note = misc_feature - bicyclic nucleic acid scaffold modification
  modified_base 15..16: mod_base = OTHER; note = misc_feature - bicyclic nucleic acid scaffold modification
  source 1..16: mol_type = other RNA
ttgtacttcatcccac

SEQ ID NO: 5408 - RNA, 16 nt, synthetic construct
  modified_base 1: mod_base = OTHER; note = thymine
  modified_base 16: mod_base = OTHER; note = thymine
  misc_feature 1..16: note = Antisense oligonucleotide
  modified_base 1: mod_base = OTHER; note = misc_feature - bicyclic nucleic acid scaffold modification
  modified_base 16: mod_base = OTHER; note = misc_feature - bicyclic nucleic acid scaffold modification
  source 1..16: mol_type = other RNA
tgtacttcatcccact

SEQ ID NO: 5409 - RNA, 16 nt, synthetic construct
  modified_base 1: mod_base = OTHER; note = thymine
  modified_base 16: mod_base = OTHER; note = thymine
  misc_feature 1..16: note = Antisense oligonucleotide
  modified_base 1: mod_base = OTHER; note = misc_feature - bicyclic nucleic acid scaffold modification
  modified_base 5: mod_base = OTHER; note = misc_feature - bicyclic nucleic acid scaffold modification
  modified_base 16: mod_base = OTHER; note = misc_feature - bicyclic nucleic acid scaffold modification
  source 1..16: mol_type = other RNA
tgtacttcatcccact

SEQ ID NO: 5410 - RNA, 16 nt, synthetic construct
  modified_base 1: mod_base = OTHER; note = thymine
  modified_base 16: mod_base = OTHER; note = thymine
  misc_feature 1..16: note = Antisense oligonucleotide
  modified_base 1: mod_base = OTHER; note = misc_feature - bicyclic nucleic acid scaffold modification
  modified_base 8: mod_base = OTHER; note = misc_feature - bicyclic nucleic acid scaffold modification
  modified_base 16: mod_base = OTHER; note = misc_feature - bicyclic nucleic acid scaffold modification
  source 1..16: mol_type = other RNA
tgtacttcatcccact

SEQ ID NO: 5411 - RNA, 16 nt, synthetic construct
  modified_base 1: mod_base = OTHER; note = thymine
  modified_base 16: mod_base = OTHER; note = thymine
  misc_feature 1..16: note = Antisense oligonucleotide
  modified_base 1: mod_base = OTHER; note = misc_feature - bicyclic nucleic acid scaffold modification
  modified_base 15..16: mod_base = OTHER; note = misc_feature - bicyclic nucleic acid scaffold modification
  source 1..16: mol_type = other RNA
tgtacttcatcccact

SEQ ID NO: 5412 - RNA, 16 nt, synthetic construct
  modified_base 1: mod_base = OTHER; note = thymine
  modified_base 16: mod_base = OTHER; note = thymine
  misc_feature 1..16: note = Antisense oligonucleotide
  modified_base 1: mod_base = OTHER; note = misc_feature - bicyclic nucleic acid scaffold modification
  modified_base 8: mod_base = OTHER; note = misc_feature - bicyclic nucleic acid scaffold modification
  modified_base 15..16: mod_base = OTHER; note = misc_feature - bicyclic nucleic acid scaffold modification
  source 1..16: mol_type = other RNA
tgtacttcatcccact

SEQ ID NO: 5413 - RNA, 16 nt, synthetic construct
  modified_base 1: mod_base = OTHER; note = thymine
  modified_base 16: mod_base = OTHER; note = thymine
  misc_feature 1..16: note = Antisense oligonucleotide
  modified_base 1: mod_base = OTHER; note = misc_feature - bicyclic nucleic acid scaffold modification
  modified_base 5: mod_base = OTHER; note = misc_feature - bicyclic nucleic acid scaffold modification
  modified_base 8: mod_base = OTHER; note = misc_feature - bicyclic nucleic acid scaffold modification
  modified_base 16: mod_base = OTHER; note = misc_feature - bicyclic nucleic acid scaffold modification
  source 1..16: mol_type = other RNA
tgtacttcatcccact

SEQ ID NO: 5414 - RNA, 16 nt, synthetic construct
  modified_base 1: mod_base = OTHER; note = thymine
  modified_base 16: mod_base = OTHER; note = thymine
  misc_feature 1..16: note = Antisense oligonucleotide
  modified_base 1..2: mod_base = OTHER; note = misc_feature - bicyclic nucleic acid scaffold modification
  modified_base 8: mod_base = OTHER; note = misc_feature - bicyclic nucleic acid scaffold modification
  modified_base 16: mod_base = OTHER; note = misc_feature - bicyclic nucleic acid scaffold modification
  source 1..16: mol_type = other RNA
tgtacttcatcccact

SEQ ID NO: 5415 - RNA, 16 nt, synthetic construct
  modified_base 1: mod_base = OTHER; note = thymine
  modified_base 16: mod_base = OTHER; note = thymine
  misc_feature 1..16: note = Antisense oligonucleotide
  modified_base 1..2: mod_base = OTHER; note = misc_feature - bicyclic nucleic acid scaffold modification
  modified_base 15..16: mod_base = OTHER; note = misc_feature - bicyclic nucleic acid scaffold modification
  source 1..16: mol_type = other RNA
tgtacttcatcccact

SEQ ID NO: 5416 - RNA, 16 nt, synthetic construct
  modified_base 1: mod_base = OTHER; note = thymine
  modified_base 16: mod_base = OTHER; note = thymine
  misc_feature 1..16: note = Antisense oligonucleotide
  modified_base 1..2: mod_base = OTHER; note = misc_feature - bicyclic nucleic acid scaffold modification
  modified_base 5: mod_base = OTHER; note = misc_feature - bicyclic nucleic acid scaffold modification
  modified_base 8: mod_base = OTHER; note = misc_feature - bicyclic nucleic acid scaffold modification
  modified_base 15..16: mod_base = OTHER; note = misc_feature - bicyclic nucleic acid scaffold modification
  source 1..16: mol_type = other RNA
tgtacttcatcccact

SEQ ID NO: 5417 - RNA, 16 nt, synthetic construct
  misc_feature 1..16: note = Antisense oligonucleotide
  modified_base 1: mod_base = OTHER; note = misc_feature - bicyclic nucleic acid scaffold modification
  modified_base 16: mod_base = OTHER; note = misc_feature - bicyclic nucleic acid scaffold modification
  source 1..16: mol_type = other RNA
gtacttcatcccactg

SEQ ID NO: 5418 - RNA, 16 nt, synthetic construct
  misc_feature 1..16: note = Antisense oligonucleotide
  modified_base 1: mod_base = OTHER; note = misc_feature - bicyclic nucleic acid scaffold modification
  modified_base 4: mod_base = OTHER; note = misc_feature - bicyclic nucleic acid scaffold modification
  modified_base 16: mod_base = OTHER; note = misc_feature - bicyclic nucleic acid scaffold modification
  source 1..16: mol_type = other RNA
gtacttcatcccactg

SEQ ID NO: 5419 - RNA, 16 nt, synthetic construct
  misc_feature 1..16: note = Antisense oligonucleotide
  modified_base 1: mod_base = OTHER; note = misc_feature - bicyclic nucleic acid scaffold modification
  modified_base 7: mod_base = OTHER; note = misc_feature - bicyclic nucleic acid scaffold modification
  modified_base 16: mod_base = OTHER; note = misc_feature - bicyclic nucleic acid scaffold modification
  source 1..16: mol_type = other RNA
gtacttcatcccactg

SEQ ID NO: 5420 - RNA, 16 nt, synthetic construct
  misc_feature 1..16: note = Antisense oligonucleotide
  modified_base 1: mod_base = OTHER; note = misc_feature - bicyclic nucleic acid scaffold modification
  modified_base 14: mod_base = OTHER; note = misc_feature - bicyclic nucleic acid scaffold modification
  modified_base 16: mod_base = OTHER; note = misc_feature - bicyclic nucleic acid scaffold modification
  source 1..16: mol_type = other RNA
gtacttcatcccactg

SEQ ID NO: 5421 - RNA, 16 nt, synthetic construct
  misc_feature 1..16: note = Antisense oligonucleotide
  modified_base 1: mod_base = OTHER; note = misc_feature - bicyclic nucleic acid scaffold modification
  modified_base 4: mod_base = OTHER; note = misc_feature - bicyclic nucleic acid scaffold modification
  modified_base 14: mod_base = OTHER; note = misc_feature - bicyclic nucleic acid scaffold modification
  modified_base 16: mod_base = OTHER; note = misc_feature - bicyclic nucleic acid scaffold modification
  source 1..16: mol_type = other RNA
gtacttcatcccactg

SEQ ID NO: 5422 - RNA, 16 nt, synthetic construct
  misc_feature 1..16: note = Antisense oligonucleotide
  modified_base 1: mod_base = OTHER; note = misc_feature - bicyclic nucleic acid scaffold modification
  modified_base 7: mod_base = OTHER; note = misc_feature - bicyclic nucleic acid scaffold modification
  modified_base 14: mod_base = OTHER; note = misc_feature - bicyclic nucleic acid scaffold modification
  modified_base 16: mod_base = OTHER; note = misc_feature - bicyclic nucleic acid scaffold modification
  source 1..16: mol_type = other RNA
gtacttcatcccactg

SEQ ID NO: 5423 - RNA, 16 nt, synthetic construct
  modified_base 15: mod_base = OTHER; note = thymine
  misc_feature 1..16: note = Antisense oligonucleotide
  modified_base 1: mod_base = OTHER; note = misc_feature - bicyclic nucleic acid scaffold modification
  modified_base 15..16: mod_base = OTHER; note = misc_feature - bicyclic nucleic acid scaffold modification
  source 1..16: mol_type = other RNA
gtacttcatcccactg

SEQ ID NO: 5424 - RNA, 16 nt, synthetic construct
  modified_base 15: mod_base = OTHER; note = thymine
  misc_feature 1..16: note = Antisense oligonucleotide
  modified_base 1: mod_base = OTHER; note = misc_feature - bicyclic nucleic acid scaffold modification
  modified_base 7: mod_base = OTHER; note = misc_feature - bicyclic nucleic acid scaffold modification
  modified_base 15..16: mod_base = OTHER; note = misc_feature - bicyclic nucleic acid scaffold modification
  source 1..16: mol_type = other RNA
gtacttcatcccactg

SEQ ID NO: 5425 - RNA, 16 nt, synthetic construct
  modified_base 2: mod_base = OTHER; note = thymine
  modified_base 15: mod_base = OTHER; note = thymine
  misc_feature 1..16: note = Antisense oligonucleotide
  modified_base 1..2: mod_base = OTHER; note = misc_feature - bicyclic nucleic acid scaffold modification
  modified_base 4: mod_base = OTHER; note = misc_feature - bicyclic nucleic acid scaffold modification
  modified_base 15..16: mod_base = OTHER; note = misc_feature - bicyclic nucleic acid scaffold modification
  source 1..16: mol_type = other RNA
gtacttcatcccactg

SEQ ID NO: 5426 - RNA, 16 nt, synthetic construct
  modified_base 1: mod_base = OTHER; note = thymine
  misc_feature 1..16: note = Antisense oligonucleotide
  modified_base 1: mod_base = OTHER; note = misc_feature - bicyclic nucleic acid scaffold modification
  modified_base 16: mod_base = OTHER; note = misc_feature - bicyclic nucleic acid scaffold modification
  source 1..16: mol_type = other RNA
tacttcatcccactga

SEQ ID NO: 5427 - RNA, 16 nt, synthetic construct
  modified_base 1: mod_base = OTHER; note = thymine
  misc_feature 1..16: note = Antisense oligonucleotide
  modified_base 1: mod_base = OTHER; note = misc_feature - bicyclic nucleic acid scaffold modification
  modified_base 3: mod_base = OTHER; note = misc_feature - bicyclic nucleic acid scaffold modification
  modified_base 16: mod_base = OTHER; note = misc_feature - bicyclic nucleic acid scaffold modification
  source 1..16: mol_type = other RNA
tacttcatcccactga

SEQ ID NO: 5428 - RNA, 16 nt, synthetic construct
  modified_base 1: mod_base = OTHER; note = thymine
  misc_feature 1..16: note = Antisense oligonucleotide
  modified_base 1: mod_base = OTHER; note = misc_feature - bicyclic nucleic acid scaffold modification
  modified_base 6: mod_base = OTHER; note = misc_feature - bicyclic nucleic acid scaffold modification
  modified_base 16: mod_base = OTHER; note = misc_feature - bicyclic nucleic acid scaffold modification
  source 1..16: mol_type = other RNA
tacttcatcccactga

SEQ ID NO: 5429 - RNA, 16 nt, synthetic construct
  modified_base 1: mod_base = OTHER; note = thymine
  misc_feature 1..16: note = Antisense oligonucleotide
  modified_base 1: mod_base = OTHER; note = misc_feature - bicyclic nucleic acid scaffold modification
  modified_base 13: mod_base = OTHER; note = misc_feature - bicyclic nucleic acid scaffold modification
  modified_base 16: mod_base = OTHER; note = misc_feature - bicyclic nucleic acid scaffold modification
  source 1..16: mol_type = other RNA
tacttcatcccactga

SEQ ID NO: 5430 - RNA, 16 nt, synthetic construct
  modified_base 1: mod_base = OTHER; note = thymine
  misc_feature 1..16: note = Antisense oligonucleotide
  modified_base 1: mod_base = OTHER; note = misc_feature - bicyclic nucleic acid scaffold modification
  modified_base 15..16: mod_base = OTHER; note = misc_feature - bicyclic nucleic acid scaffold modification
  source 1..16: mol_type = other RNA
tacttcatcccactga

SEQ ID NO: 5431 - RNA, 16 nt, synthetic construct
  modified_base 1: mod_base = OTHER; note = thymine
  misc_feature 1..16: note = Antisense oligonucleotide
  modified_base 1: mod_base = OTHER; note = misc_feature - bicyclic nucleic acid scaffold modification
  modified_base 6: mod_base = OTHER; note = misc_feature - bicyclic nucleic acid scaffold modification
  modified_base 15..16: mod_base = OTHER; note = misc_feature - bicyclic nucleic acid scaffold modification
  source 1..16: mol_type = other RNA
tacttcatcccactga

SEQ ID NO: 5432 - RNA, 16 nt, synthetic construct
  modified_base 1: mod_base = OTHER; note = thymine
  misc_feature 1..16: note = Antisense oligonucleotide
  modified_base 1: mod_base = OTHER; note = misc_feature - bicyclic nucleic acid scaffold modification
  modified_base 3: mod_base = OTHER; note = misc_feature - bicyclic nucleic acid scaffold modification
  modified_base 15..16: mod_base = OTHER; note = misc_feature - bicyclic nucleic acid scaffold modification
  source 1..16: mol_type = other RNA
tacttcatcccactga

SEQ ID NO: 5433 - RNA, 16 nt, synthetic construct
  modified_base 1: mod_base = OTHER; note = thymine
  misc_feature 1..16: note = Antisense oligonucleotide
  modified_base 1..2: mod_base = OTHER; note = misc_feature - bicyclic nucleic acid scaffold modification
  modified_base 15..16: mod_base = OTHER; note = misc_feature - bicyclic nucleic acid scaffold modification
  source 1..16: mol_type = other RNA
tacttcatcccactga

SEQ ID NO: 5434 - RNA, 16 nt, synthetic construct
  modified_base 1: mod_base = OTHER; note = thymine
  misc_feature 1..16: note = Antisense oligonucleotide
  modified_base 1..2: mod_base = OTHER; note = misc_feature - bicyclic nucleic acid scaffold modification
  modified_base 6: mod_base = OTHER; note = misc_feature - bicyclic nucleic acid scaffold modification
  modified_base 16: mod_base = OTHER; note = misc_feature - bicyclic nucleic acid scaffold modification
  source 1..16: mol_type = other RNA
tacttcatcccactga

SEQ ID NO: 5435 - RNA, 16 nt, synthetic construct
  modified_base 16: mod_base = OTHER; note = thymine
  misc_feature 1..16: note = Antisense oligonucleotide
  modified_base 1: mod_base = OTHER; note = misc_feature - bicyclic nucleic acid scaffold modification
  modified_base 16: mod_base = OTHER; note = misc_feature - bicyclic nucleic acid scaffold modification
  source 1..16: mol_type = other RNA
acttcatcccactgat

SEQ ID NO: 5436 - RNA, 16 nt, synthetic construct
  modified_base 16: mod_base = OTHER; note = thymine
  misc_feature 1..16: note = Antisense oligonucleotide
  modified_base 1..2: mod_base = OTHER; note = misc_feature - bicyclic nucleic acid scaffold modification
  modified_base 16: mod_base = OTHER; note = misc_feature - bicyclic nucleic acid scaffold modification
  source 1..16: mol_type = other RNA
acttcatcccactgat

SEQ ID NO: 5437 - RNA, 16 nt, synthetic construct
  modified_base 16: mod_base = OTHER; note = thymine
  misc_feature 1..16: note = Antisense oligonucleotide
  modified_base 1: mod_base = OTHER; note = misc_feature - bicyclic nucleic acid scaffold modification
  modified_base 5: mod_base = OTHER; note = misc_feature - bicyclic nucleic acid scaffold modification
  modified_base 16: mod_base = OTHER; note = misc_feature - bicyclic nucleic acid scaffold modification
  source 1..16: mol_type = other RNA
acttcatcccactgat

SEQ ID NO: 5438 - RNA, 16 nt, synthetic construct
  modified_base 16: mod_base = OTHER; note = thymine
  misc_feature 1..16: note = Antisense oligonucleotide
  modified_base 1: mod_base = OTHER; note = misc_feature - bicyclic nucleic acid scaffold modification
  modified_base 16: mod_base = OTHER; note = misc_feature - bicyclic nucleic acid scaffold modification
  source 1..16: mol_type = other RNA
acttcatcccactgat

SEQ ID NO: 5439 - RNA, 16 nt, synthetic construct
  modified_base 16: mod_base = OTHER; note = thymine
  misc_feature 1..16: note = Antisense oligonucleotide
  modified_base 1: mod_base = OTHER; note = misc_feature - bicyclic nucleic acid scaffold modification
  modified_base 12: mod_base = OTHER; note = misc_feature - bicyclic nucleic acid scaffold modification
  modified_base 16: mod_base = OTHER; note = misc_feature - bicyclic nucleic acid scaffold modification
  source 1..16: mol_type = other RNA
acttcatcccactgat

SEQ ID NO: 5440 - RNA, 16 nt, synthetic construct
  modified_base 16: mod_base = OTHER; note = thymine
  misc_feature 1..16: note = Antisense oligonucleotide
  modified_base 1: mod_base = OTHER; note = misc_feature - bicyclic nucleic acid scaffold modification
  modified_base 14: mod_base = OTHER; note = misc_feature - bicyclic nucleic acid scaffold modification
  modified_base 16: mod_base = OTHER; note = misc_feature - bicyclic nucleic acid scaffold modification
  source 1..16: mol_type = other RNA
acttcatcccactgat

SEQ ID NO: 5441 - RNA, 16 nt, synthetic construct
  modified_base 16: mod_base = OTHER; note = thymine
  misc_feature 1..16: note = Antisense oligonucleotide
  modified_base 1: mod_base = OTHER; note = misc_feature - bicyclic nucleic acid scaffold modification
  modified_base 5: mod_base = OTHER; note = misc_feature - bicyclic nucleic acid scaffold modification
  modified_base 14: mod_base = OTHER; note = misc_feature - bicyclic nucleic acid scaffold modification
  modified_base 16: mod_base = OTHER; note = misc_feature - bicyclic nucleic acid scaffold modification
  source 1..16: mol_type = other RNA
acttcatcccactgat

SEQ ID NO: 5442 - RNA, 16 nt, synthetic construct
  modified_base 16: mod_base = OTHER; note = thymine
  misc_feature 1..16: note = Antisense oligonucleotide
  modified_base 1: mod_base = OTHER; note = misc_feature - bicyclic nucleic acid scaffold modification
  modified_base 5: mod_base = OTHER; note = misc_feature - bicyclic nucleic acid scaffold modification
  modified_base 12: mod_base = OTHER; note = misc_feature - bicyclic nucleic acid scaffold modification
  modified_base 16: mod_base = OTHER; note = misc_feature - bicyclic nucleic acid scaffold modification
  source 1..16: mol_type = other RNA
acttcatcccactgat

SEQ ID NO: 5443 - RNA, 16 nt, synthetic construct
  modified_base 16: mod_base = OTHER; note = thymine
  misc_feature 1..16: note = Antisense oligonucleotide
  modified_base 1..2: mod_base = OTHER; note = misc_feature - bicyclic nucleic acid scaffold modification
  modified_base 15..16: mod_base = OTHER; note = misc_feature - bicyclic nucleic acid scaffold modification
  source 1..16: mol_type = other RNA
acttcatcccactgat

SEQ ID NO: 5444 - RNA, 16 nt, synthetic construct
  modified_base 16: mod_base = OTHER; note = thymine
  misc_feature 1..16: note = Antisense oligonucleotide
  modified_base 1..2: mod_base = OTHER; note = misc_feature - bicyclic nucleic acid scaffold modification
  modified_base 5: mod_base = OTHER; note = misc_feature - bicyclic nucleic acid scaffold modification
  modified_base 15..16: mod_base = OTHER; note = misc_feature - bicyclic nucleic acid scaffold modification
  source 1..16: mol_type = other RNA
acttcatcccactgat

SEQ ID NO: 5445 - RNA, 16 nt, synthetic construct
  modified_base 16: mod_base = OTHER; note = thymine
  misc_feature 1..16: note = Antisense oligonucleotide
  modified_base 1..2: mod_base = OTHER; note = misc_feature - bicyclic nucleic acid scaffold modification
  modified_base 5: mod_base = OTHER; note = misc_feature - bicyclic nucleic acid scaffold modification
  modified_base 12: mod_base = OTHER; note = misc_feature - bicyclic nucleic acid scaffold modification
  modified_base 15..16: mod_base = OTHER; note = misc_feature - bicyclic nucleic acid scaffold modification
  source 1..16: mol_type = other RNA
acttcatcccactgat

SEQ ID NO: 5446 - RNA, 24 nt, synthetic construct
  modified_base 24: mod_base = OTHER; note = thymine
  misc_feature 1..24: note = Antisense oligonucleotide
  modified_base 1: mod_base = OTHER; note = misc_feature - bicyclic nucleic acid scaffold modification
  modified_base 24: mod_base = OTHER; note = misc_feature - bicyclic nucleic acid scaffold modification
  source 1..24: mol_type = other RNA
gaccctccttccatgactcaagct

SEQ ID NO: 5447 - RNA, 24 nt, synthetic construct
  modified_base 24: mod_base = OTHER; note = thymine
  misc_feature 1..24: note = Antisense oligonucleotide
  modified_base 1: mod_base = OTHER; note = misc_feature - bicyclic nucleic acid scaffold modification
  modified_base 5: mod_base = OTHER; note = misc_feature - bicyclic nucleic acid scaffold modification
  modified_base 24: mod_base = OTHER; note = misc_feature - bicyclic nucleic acid scaffold modification
  source 1..24: mol_type = other RNA
gaccctccttccatgactcaagct

SEQ ID NO: 5448 - RNA, 24 nt, synthetic construct
  modified_base 24: mod_base = OTHER; note = thymine
  misc_feature 1..24: note = Antisense oligonucleotide
  modified_base 1: mod_base = OTHER; note = misc_feature - bicyclic nucleic acid scaffold modification
  modified_base 8: mod_base = OTHER; note = misc_feature - bicyclic nucleic acid scaffold modification
  modified_base 24: mod_base = OTHER; note = misc_feature - bicyclic nucleic acid scaffold modification
  source 1..24: mol_type = other RNA
gaccctccttccatgactcaagct

SEQ ID NO: 5449 - RNA, 24 nt, synthetic construct
  modified_base 24: mod_base = OTHER; note = thymine
  misc_feature 1..24: note = Antisense oligonucleotide
  modified_base 1: mod_base = OTHER; note = misc_feature - bicyclic nucleic acid scaffold modification
  modified_base 12: mod_base = OTHER; note = misc_feature - bicyclic nucleic acid scaffold modification
  modified_base 24: mod_base = OTHER; note = misc_feature - bicyclic nucleic acid scaffold modification
  source 1..24: mol_type = other RNA
gaccctccttccatgactcaagct

SEQ ID NO: 5450 - RNA, 24 nt, synthetic construct
  modified_base 24: mod_base = OTHER; note = thymine
  misc_feature 1..24: note = Antisense oligonucleotide
  modified_base 1: mod_base = OTHER; note = misc_feature - bicyclic nucleic acid scaffold modification
  modified_base 15: mod_base = OTHER; note = misc_feature - bicyclic nucleic acid scaffold modification
  modified_base 24: mod_base = OTHER; note = misc_feature - bicyclic nucleic acid scaffold modification
  source 1..24: mol_type = other RNA
gaccctccttccatgactcaagct

SEQ ID NO: 5451 - RNA, 24 nt, synthetic construct
  modified_base 24: mod_base = OTHER; note = thymine
  misc_feature 1..24: note = Antisense oligonucleotide
  modified_base 1: mod_base = OTHER; note = misc_feature - bicyclic nucleic acid scaffold modification
  modified_base 17: mod_base = OTHER; note = misc_feature - bicyclic nucleic acid scaffold modification
  modified_base 24: mod_base = OTHER; note = misc_feature - bicyclic nucleic acid scaffold modification
  source 1..24: mol_type = other RNA
gaccctccttccatgactcaagct

SEQ ID NO: 5452 - RNA, 24 nt, synthetic construct
  modified_base 24: mod_base = OTHER; note = thymine
  misc_feature 1..24: note = Antisense oligonucleotide
  modified_base 1: mod_base = OTHER; note = misc_feature - bicyclic nucleic acid scaffold modification
  modified_base 19: mod_base = OTHER; note = misc_feature - bicyclic nucleic acid scaffold modification
  modified_base 24: mod_base = OTHER; note = misc_feature - bicyclic nucleic acid scaffold modification
  source 1..24: mol_type = other RNA
gaccctccttccatgactcaagct

SEQ ID NO: 5453 - RNA, 24 nt, synthetic construct
  modified_base 24: mod_base = OTHER; note = thymine
  misc_feature 1..24: note = Antisense oligonucleotide
  modified_base 1: mod_base = OTHER; note = misc_feature - bicyclic nucleic acid scaffold modification
  modified_base 22: mod_base = OTHER; note = misc_feature - bicyclic nucleic acid scaffold modification
  modified_base 24: mod_base = OTHER; note = misc_feature - bicyclic nucleic acid scaffold modification
  source 1..24: mol_type = other RNA
gaccctccttccatgactcaagct

SEQ ID NO: 5454 - RNA, 24 nt, synthetic construct
  modified_base 24: mod_base = OTHER; note = thymine
  misc_feature 1..24: note = Antisense oligonucleotide
  modified_base 1: mod_base = OTHER; note = misc_feature - bicyclic nucleic acid scaffold modification
  modified_base 15: mod_base = OTHER; note = misc_feature - bicyclic nucleic acid scaffold modification
  modified_base 22: mod_base = OTHER; note = misc_feature - bicyclic nucleic acid scaffold modification
  modified_base 24: mod_base = OTHER; note = misc_feature - bicyclic nucleic acid scaffold modification
  source 1..24: mol_type = other RNA
gaccctccttccatgactcaagct

SEQ ID NO: 5455 - RNA, 24 nt, synthetic construct
  modified_base 24: mod_base = OTHER; note = thymine
  misc_feature 1..24: note = Antisense oligonucleotide
  modified_base 1: mod_base = OTHER; note = misc_feature - bicyclic nucleic acid scaffold modification
  modified_base 12: mod_base = OTHER; note = misc_feature - bicyclic nucleic acid scaffold modification
  modified_base 19: mod_base = OTHER; note = misc_feature - bicyclic nucleic acid scaffold modification
  modified_base 24: mod_base = OTHER; note = misc_feature - bicyclic nucleic acid scaffold modification
  source 1..24: mol_type = other RNA
gaccctccttccatgactcaagct

SEQ ID NO: 5456 - RNA, 24 nt, synthetic construct
  modified_base 24: mod_base = OTHER; note = thymine
  misc_feature 1..24: note = Antisense oligonucleotide
  modified_base 1: mod_base = OTHER; note = misc_feature - bicyclic nucleic acid scaffold modification
  modified_base 7: mod_base = OTHER; note = misc_feature - bicyclic nucleic acid scaffold modification
  modified_base 11: mod_base = OTHER; note = misc_feature - bicyclic nucleic acid scaffold modification
  modified_base 24: mod_base = OTHER; note = misc_feature - bicyclic nucleic acid scaffold modification
  source 1..24: mol_type = other RNA
gaccctccttccatgactcaagct

SEQ ID NO: 5457 - RNA, 24 nt, synthetic construct
  modified_base 24: mod_base = OTHER; note = thymine
  misc_feature 1..24: note = Antisense oligonucleotide
  modified_base 1: mod_base = OTHER; note = misc_feature - bicyclic nucleic acid scaffold modification
  modified_base 23..24: mod_base = OTHER; note = misc_feature - bicyclic nucleic acid scaffold modification
  source 1..24: mol_type = other RNA
gaccctccttccatgactcaagct

SEQ ID NO: 5458 - RNA, 24 nt, synthetic construct
  modified_base 24: mod_base = OTHER; note = thymine
  misc_feature 1..24: note = Antisense oligonucleotide
  modified_base 1: mod_base = OTHER; note = misc_feature - bicyclic nucleic acid scaffold modification
  modified_base 15: mod_base = OTHER; note = misc_feature - bicyclic nucleic acid scaffold modification
  modified_base 23..24: mod_base = OTHER; note = misc_feature - bicyclic nucleic acid scaffold modification
  source 1..24: mol_type = other RNA
gaccctccttccatgactcaagct

SEQ ID NO: 5459 - RNA, 24 nt, synthetic construct
  modified_base 24: mod_base = OTHER; note = thymine
  misc_feature 1..24: note = Antisense oligonucleotide
  modified_base 1: mod_base = OTHER; note = misc_feature - bicyclic nucleic acid scaffold modification
  modified_base 15: mod_base = OTHER; note = misc_feature - bicyclic nucleic acid scaffold modification
  modified_base 22..24: mod_base = OTHER; note = misc_feature - bicyclic nucleic acid scaffold modification
  source 1..24: mol_type = other RNA
gaccctccttccatgactcaagct

SEQ ID NO: 5460 - RNA, 24 nt, synthetic construct
  modified_base 24: mod_base = OTHER; note = thymine
  misc_feature 1..24: note = Antisense oligonucleotide
  modified_base 1..2: mod_base = OTHER; note = misc_feature - bicyclic nucleic acid scaffold modification
  modified_base 17: mod_base = OTHER; note = misc_feature - bicyclic nucleic acid scaffold modification
  modified_base 23..24: mod_base = OTHER; note = misc_feature - bicyclic nucleic acid scaffold modification
  source 1..24: mol_type = other RNA
gaccctccttccatgactcaagct

SEQ ID NO: 5461 - RNA, 22 nt, synthetic construct
  misc_feature 1..22: note = Antisense oligonucleotide
  modified_base 1: mod_base = OTHER; note = misc_feature - bicyclic nucleic acid scaffold modification
  modified_base 22: mod_base = OTHER; note = misc_feature - bicyclic nucleic acid scaffold modification
  source 1..22: mol_type = other RNA
gaccctccttccatgactcaag

SEQ ID NO: 5462 - RNA, 22 nt, synthetic construct
  misc_feature 1..22: note = Antisense oligonucleotide
  modified_base 1: mod_base = OTHER; note = misc_feature - bicyclic nucleic acid scaffold modification
  modified_base 7: mod_base = OTHER; note = misc_feature - bicyclic nucleic acid scaffold modification
  modified_base 22: mod_base = OTHER; note = misc_feature - bicyclic nucleic acid scaffold modification
  source 1..22: mol_type = other RNA
gaccctccttccatgactcaag

SEQ ID NO: 5463 - RNA, 22 nt, synthetic construct
  misc_feature 1..22: note = Antisense oligonucleotide
  modified_base 1: mod_base = OTHER; note = misc_feature - bicyclic nucleic acid scaffold modification
  modified_base 11: mod_base = OTHER; note = misc_feature - bicyclic nucleic acid scaffold modification
  modified_base 22: mod_base = OTHER; note = misc_feature - bicyclic nucleic acid scaffold modification
  source 1..22: mol_type = other RNA
gaccctccttccatgactcaag

SEQ ID NO: 5464 - RNA, 22 nt, synthetic construct
  misc_feature 1..22: note = Antisense oligonucleotide
  modified_base 1: mod_base = OTHER; note = misc_feature - bicyclic nucleic acid scaffold modification
  modified_base 15: mod_base = OTHER; note = misc_feature - bicyclic nucleic acid scaffold modification
  modified_base 22: mod_base = OTHER; note = misc_feature - bicyclic nucleic acid scaffold modification
  source 1..22: mol_type = other RNA
gaccctccttccatgactcaag

SEQ ID NO: 5465 - RNA, 22 nt, synthetic construct
  misc_feature 1..22: note = Antisense oligonucleotide
  modified_base 1: mod_base = OTHER; note = misc_feature - bicyclic nucleic acid scaffold modification
  modified_base 17: mod_base = OTHER; note = misc_feature - bicyclic nucleic acid scaffold modification
  modified_base 22: mod_base = OTHER; note = misc_feature - bicyclic nucleic acid scaffold modification
  source 1..22: mol_type = other RNA
gaccctccttccatgactcaag

SEQ ID NO: 5466 - RNA, 22 nt, synthetic construct
  misc_feature 1..22: note = Antisense oligonucleotide
  modified_base 1: mod_base = OTHER; note = misc_feature - bicyclic nucleic acid scaffold modification
  modified_base 19: mod_base = OTHER; note = misc_feature - bicyclic nucleic acid scaffold modification
  modified_base 22: mod_base = OTHER; note = misc_feature - bicyclic nucleic acid scaffold modification
  source 1..22: mol_type = other RNA
gaccctccttccatgactcaag

SEQ ID NO: 5467 - RNA, 22 nt, synthetic construct
  misc_feature 1..22: note = Antisense oligonucleotide
  modified_base 1: mod_base = OTHER; note = misc_feature - bicyclic nucleic acid scaffold modification
  modified_base 12: mod_base = OTHER; note = misc_feature - bicyclic nucleic acid scaffold modification
  modified_base 19: mod_base = OTHER; note = misc_feature - bicyclic nucleic acid scaffold modification
  modified_base 22: mod_base = OTHER; note = misc_feature - bicyclic nucleic acid scaffold modification
  source 1..22: mol_type = other RNA
gaccctccttccatgactcaag

SEQ ID NO: 5468 - RNA, 22 nt, synthetic construct
  misc_feature 1..22: note = Antisense oligonucleotide
  modified_base 1: mod_base = OTHER; note = misc_feature - bicyclic nucleic acid scaffold modification
  modified_base 8: mod_base = OTHER; note = misc_feature - bicyclic nucleic acid scaffold modification
  modified_base 17: mod_base = OTHER; note = misc_feature - bicyclic nucleic acid scaffold modification
  modified_base 22: mod_base = OTHER; note = misc_feature - bicyclic nucleic acid scaffold modification
  source 1..22: mol_type = other RNA
gaccctccttccatgactcaag

SEQ ID NO: 5469 - RNA, 22 nt, synthetic construct
  misc_feature 1..22: note = Antisense oligonucleotide
  modified_base 1: mod_base = OTHER; note = misc_feature - bicyclic nucleic acid scaffold modification
  modified_base 15: mod_base = OTHER; note = misc_feature - bicyclic nucleic acid scaffold modification
  modified_base 19: mod_base = OTHER; note = misc_feature - bicyclic nucleic acid scaffold modification
  modified_base 22: mod_base = OTHER; note = misc_feature - bicyclic nucleic acid scaffold modification
  source 1..22: mol_type = other RNA
gaccctccttccatgactcaag

SEQ ID NO: 5470 - RNA, 22 nt, synthetic construct
  misc_feature 1..22: note = Antisense oligonucleotide
  modified_base 1: mod_base = OTHER; note = misc_feature - bicyclic nucleic acid scaffold modification
  modified_base 5: mod_base = OTHER; note = misc_feature - bicyclic nucleic acid scaffold modification
  modified_base 12: mod_base = OTHER; note = misc_feature - bicyclic nucleic acid scaffold modification
  modified_base 22: mod_base = OTHER; note = misc_feature - bicyclic nucleic acid scaffold modification
  source 1..22: mol_type = other RNA
gaccctccttccatgactcaag

SEQ ID NO: 5471 - RNA, 22 nt, synthetic construct
  misc_feature 1..22: note = Antisense oligonucleotide
  modified_base 1: mod_base = OTHER; note = misc_feature - bicyclic nucleic acid scaffold modification
  modified_base 21..22: mod_base = OTHER; note = misc_feature - bicyclic nucleic acid scaffold modification
  source 1..22: mol_type = other RNA
gaccctccttccatgactcaag

SEQ ID NO: 5472 - RNA, 22 nt, synthetic construct
  misc_feature 1..22: note = Antisense oligonucleotide
  modified_base 1..2: mod_base = OTHER; note = misc_feature - bicyclic nucleic acid scaffold modification
  modified_base 21..22: mod_base = OTHER; note = misc_feature - bicyclic nucleic acid scaffold modification
  source 1..22: mol_type = other RNA
gaccctccttccatgactcaag

SEQ ID NO: 5473 - RNA, 22 nt, synthetic construct
  misc_feature 1..22: note = Antisense oligonucleotide
  modified_base 1: mod_base = OTHER; note = misc_feature - bicyclic nucleic acid scaffold modification
  modified_base 15: mod_base = OTHER; note = misc_feature - bicyclic nucleic acid scaffold modification
  modified_base 21..22: mod_base = OTHER; note = misc_feature - bicyclic nucleic acid scaffold modification
  source 1..22: mol_type = other RNA
gaccctccttccatgactcaag

SEQ ID NO: 5474 - RNA, 22 nt, synthetic construct
  misc_feature 1..22: note = Antisense oligonucleotide
  modified_base 1: mod_base = OTHER; note = misc_feature - bicyclic nucleic acid scaffold modification
  modified_base 8: mod_base = OTHER; note = misc_feature - bicyclic nucleic acid scaffold modification
  modified_base 15: mod_base = OTHER; note = misc_feature - bicyclic nucleic acid scaffold modification
  modified_base 19: mod_base = OTHER; note = misc_feature - bicyclic nucleic acid scaffold modification
  modified_base 21..22: mod_base = OTHER; note = misc_feature - bicyclic nucleic acid scaffold modification
  source 1..22: mol_type = other RNA
gaccctccttccatgactcaag

SEQ ID NO: 5475 - RNA, 22 nt, synthetic construct
  misc_feature 1..22: note = Antisense oligonucleotide
  modified_base 1: mod_base = OTHER; note = misc_feature - bicyclic nucleic acid scaffold modification
  modified_base 22: mod_base = OTHER; note = misc_feature - bicyclic nucleic acid scaffold modification
  source 1..22: mol_type = other RNA
accctccttccatgactcaagc

SEQ ID NO: 5476 - RNA, 22 nt, synthetic construct
  misc_feature 1..22: note = Antisense oligonucleotide
  modified_base 1: mod_base = OTHER; note = misc_feature - bicyclic nucleic acid scaffold modification
  modified_base 21..22: mod_base = OTHER; note = misc_feature - bicyclic nucleic acid scaffold modification
  source 1..22: mol_type = other RNA
accctccttccatgactcaagc

SEQ ID NO: 5477 - RNA, 22 nt, synthetic construct
  misc_feature 1..22: note = Antisense oligonucleotide
  modified_base 1: mod_base = OTHER; note = misc_feature - bicyclic nucleic acid scaffold modification
  modified_base 18: mod_base = OTHER; note = misc_feature - bicyclic nucleic acid scaffold modification
  modified_base 22: mod_base = OTHER; note = misc_feature - bicyclic nucleic acid scaffold modification
  source 1..22: mol_type = other RNA
accctccttccatgactcaagc

SEQ ID NO: 5478 - RNA, 22 nt, synthetic construct
  misc_feature 1..22: note = Antisense oligonucleotide
  modified_base 1: mod_base = OTHER; note = misc_feature - bicyclic nucleic acid scaffold modification
  modified_base 16: mod_base = OTHER; note = misc_feature - bicyclic nucleic acid scaffold modification
  modified_base 22: mod_base = OTHER; note = misc_feature - bicyclic nucleic acid scaffold modification
  source 1..22: mol_type = other RNA
accctccttccatgactcaagc

SEQ ID NO: 5479 - RNA, 22 nt, synthetic construct
  misc_feature 1..22: note = Antisense oligonucleotide
  modified_base 1: mod_base = OTHER; note = misc_feature - bicyclic nucleic acid scaffold modification
  modified_base 14: mod_base = OTHER; note = misc_feature - bicyclic nucleic acid scaffold modification
  modified_base 22: mod_base = OTHER; note = misc_feature - bicyclic nucleic acid scaffold modification
  source 1..22: mol_type = other RNA
accctccttccatgactcaagc

SEQ ID NO: 5480 - RNA, 22 nt, synthetic construct
  misc_feature 1..22: note = Antisense oligonucleotide
  modified_base 1: mod_base = OTHER; note = misc_feature - bicyclic nucleic acid scaffold modification
  modified_base 11: mod_base = OTHER; note = misc_feature - bicyclic nucleic acid scaffold modification
  modified_base 22: mod_base = OTHER; note = misc_feature - bicyclic nucleic acid scaffold modification
  source 1..22: mol_type = other RNA
accctccttccatgactcaagc

SEQ ID NO: 5481 - RNA, 22 nt, synthetic construct
  misc_feature 1..22: note = Antisense oligonucleotide
  modified_base 1: mod_base = OTHER; note = misc_feature - bicyclic nucleic acid scaffold modification
  modified_base 7: mod_base = OTHER; note = misc_feature - bicyclic nucleic acid scaffold modification
  modified_base 22: mod_base = OTHER; note = misc_feature - bicyclic nucleic acid scaffold modification
  source 1..22: mol_type = other RNA
accctccttccatgactcaagc

SEQ ID NO: 5482 - RNA, 22 nt, synthetic construct
  misc_feature 1..22: note = Antisense oligonucleotide
  modified_base 1: mod_base = OTHER; note = misc_feature - bicyclic nucleic acid scaffold modification
  modified_base 14: mod_base = OTHER; note = misc_feature - bicyclic nucleic acid scaffold modification
  modified_base 21..22: mod_base = OTHER; note = misc_feature - bicyclic nucleic acid scaffold modification
  source 1..22: mol_type = other RNA
accctccttccatgactcaagc

SEQ ID NO: 5483 - RNA, 22 nt, synthetic construct
  misc_feature 1..22: note = Antisense oligonucleotide
  modified_base 1: mod_base = OTHER; note = misc_feature - bicyclic nucleic acid scaffold modification
  modified_base 11: mod_base = OTHER; note = misc_feature - bicyclic nucleic acid scaffold modification
  modified_base 18: mod_base = OTHER; note = misc_feature - bicyclic nucleic acid scaffold modification
  modified_base 22: mod_base = OTHER; note = misc_feature - bicyclic nucleic acid scaffold modification
  source 1..22: mol_type = other RNA
accctccttccatgactcaagc

SEQ ID NO: 5484 - RNA, 22 nt, synthetic construct
  misc_feature 1..22: note = Antisense oligonucleotide
  modified_base 1: mod_base = OTHER; note = misc_feature - bicyclic nucleic acid scaffold modification
  modified_base 7: mod_base = OTHER; note = misc_feature - bicyclic nucleic acid scaffold modification
  modified_base 16: mod_base = OTHER; note = misc_feature - bicyclic nucleic acid scaffold modification
  modified_base 22: mod_base = OTHER; note = misc_feature - bicyclic nucleic acid scaffold modification
  source 1..22: mol_type = other RNA
accctccttccatgactcaagc

SEQ ID NO: 5485 - RNA, 22 nt, synthetic construct
  misc_feature 1..22: note = Antisense oligonucleotide
  modified_base 1: mod_base = OTHER; note = misc_feature - bicyclic nucleic acid scaffold modification
  modified_base 4: mod_base = OTHER; note = misc_feature - bicyclic nucleic acid scaffold modification
  modified_base 11: mod_base = OTHER; note = misc_feature - bicyclic nucleic acid scaffold modification
  modified_base 22: mod_base = OTHER; note = misc_feature - bicyclic nucleic acid scaffold modification
  source 1..22: mol_type = other RNA
accctccttccatgactcaagc

SEQ ID NO: 5486 - RNA, 22 nt, synthetic construct
  misc_feature 1..22: note = Antisense oligonucleotide
  modified_base 1: mod_base = OTHER; note = misc_feature - bicyclic nucleic acid scaffold modification
  modified_base 21..22: mod_base = OTHER; note = misc_feature - bicyclic nucleic acid scaffold modification
  source 1..22: mol_type = other RNA
accctccttccatgactcaagc

SEQ ID NO: 5487 - RNA, 22 nt, synthetic construct
  misc_feature 1..22: note = Antisense oligonucleotide
  modified_base 1..2: mod_base = OTHER; note = misc_feature - bicyclic nucleic acid scaffold modification
  modified_base 21..22: mod_base = OTHER; note = misc_feature - bicyclic nucleic acid scaffold modification
  source 1..22: mol_type = other RNA
accctccttccatgactcaagc

SEQ ID NO: 5488 - RNA, 22 nt, synthetic construct
  misc_feature 1..22: note = Antisense oligonucleotide
  modified_base 1..2: mod_base = OTHER; note = misc_feature - bicyclic nucleic acid scaffold modification
  modified_base 14: mod_base = OTHER; note = misc_feature - bicyclic nucleic acid scaffold modification
  modified_base 21..22: mod_base = OTHER; note = misc_feature - bicyclic nucleic acid scaffold modification
  source 1..22: mol_type = other RNA
accctccttccatgactcaagc

SEQ ID NO: 5489 - RNA, 22 nt, synthetic construct
  modified_base 22: mod_base = OTHER; note = thymine
  misc_feature 1..22: note = Antisense oligonucleotide
  modified_base 1: mod_base = OTHER; note = misc_feature - bicyclic nucleic acid scaffold modification
  modified_base 22: mod_base = OTHER; note = misc_feature - bicyclic nucleic acid scaffold modification
  source 1..22: mol_type = other RNA
ccctccttccatgactcaagct

SEQ ID NO: 5490 - RNA, 22 nt, synthetic construct
  modified_base 22: mod_base = OTHER; note = thymine
  misc_feature 1..22: note = Antisense oligonucleotide
  modified_base 1: mod_base = OTHER; note = misc_feature - bicyclic nucleic acid scaffold modification
  modified_base 20: mod_base = OTHER; note = misc_feature - bicyclic nucleic acid scaffold modification
  modified_base 22: mod_base = OTHER; note = misc_feature - bicyclic nucleic acid scaffold modification
  source 1..22: mol_type = other RNA
ccctccttccatgactcaagct

SEQ ID NO: 5491 - RNA, 22 nt, synthetic construct
  modified_base 22: mod_base = OTHER; note = thymine
  misc_feature 1..22: note = Antisense oligonucleotide
  modified_base 1: mod_base = OTHER; note = misc_feature - bicyclic nucleic acid scaffold modification
  modified_base 17: mod_base = OTHER; note = misc_feature - bicyclic nucleic acid scaffold modification
  modified_base 22: mod_base = OTHER; note = misc_feature - bicyclic nucleic acid scaffold modification
  source 1..22: mol_type = other RNA
ccctccttccatgactcaagct

SEQ ID NO: 5492 - RNA, 22 nt, synthetic construct
  modified_base 22: mod_base = OTHER; note = thymine
  misc_feature 1..22: note = Antisense oligonucleotide
  modified_base 1: mod_base = OTHER; note = misc_feature - bicyclic nucleic acid scaffold modification
  modified_base 15: mod_base = OTHER; note = misc_feature - bicyclic nucleic acid scaffold modification
  modified_base 22: mod_base = OTHER; note = misc_feature - bicyclic nucleic acid scaffold modification
  source 1..22: mol_type = other RNA
ccctccttccatgactcaagct

SEQ ID NO: 5493 - RNA, 22 nt, synthetic construct
  modified_base 22: mod_base = OTHER; note = thymine
  misc_feature 1..22: note = Antisense oligonucleotide
  modified_base 1: mod_base = OTHER; note = misc_feature - bicyclic nucleic acid scaffold modification
  modified_base 13: mod_base = OTHER; note = misc_feature - bicyclic nucleic acid scaffold modification
  modified_base 22: mod_base = OTHER; note = misc_feature - bicyclic nucleic acid scaffold modification
  source 1..22: mol_type = other RNA
ccctccttccatgactcaagct

SEQ ID NO: 5494 - RNA, 22 nt, synthetic construct
  modified_base 22: mod_base = OTHER; note = thymine
  misc_feature 1..22: note = Antisense oligonucleotide
  modified_base 1: mod_base = OTHER; note = misc_feature - bicyclic nucleic acid scaffold modification
  modified_base 10: mod_base = OTHER; note = misc_feature - bicyclic nucleic acid scaffold modification
  modified_base 22: mod_base = OTHER; note = misc_feature - bicyclic nucleic acid scaffold modification
  source 1..22: mol_type = other RNA
ccctccttccatgactcaagct

SEQ ID NO: 5495 - RNA, 22 nt, synthetic construct
  modified_base 22: mod_base = OTHER; note = thymine
  misc_feature 1..22: note = Antisense oligonucleotide
  modified_base 1: mod_base = OTHER; note = misc_feature - bicyclic nucleic acid scaffold modification
  modified_base 6: mod_base = OTHER; note = misc_feature - bicyclic nucleic acid scaffold modification
  modified_base 22: mod_base = OTHER; note = misc_feature - bicyclic nucleic acid scaffold modification
  source 1..22: mol_type = other RNA
ccctccttccatgactcaagct

SEQ ID NO: 5496 - RNA, 22 nt, synthetic construct
  modified_base 22: mod_base = OTHER; note = thymine
  misc_feature 1..22: note = Antisense oligonucleotide
  modified_base 1: mod_base = OTHER; note = misc_feature - bicyclic nucleic acid scaffold modification
  modified_base 3: mod_base = OTHER; note = misc_feature - bicyclic nucleic acid scaffold modification
  modified_base 22: mod_base = OTHER; note = misc_feature - bicyclic nucleic acid scaffold modification
  source 1..22: mol_type = other RNA
ccctccttccatgactcaagct

SEQ ID NO: 5497 - RNA, 22 nt, synthetic construct
  modified_base 22: mod_base = OTHER; note = thymine
  misc_feature 1..22: note = Antisense oligonucleotide
  modified_base 1: mod_base = OTHER; note = misc_feature - bicyclic nucleic acid scaffold modification
  modified_base 13: mod_base = OTHER; note = misc_feature - bicyclic nucleic acid scaffold modification
  modified_base 20: mod_base = OTHER; note = misc_feature - bicyclic nucleic acid scaffold modification
  modified_base 22: mod_base = OTHER; note = misc_feature - bicyclic nucleic acid scaffold modification
  source 1..22: mol_type = other RNA
ccctccttccatgactcaagct

SEQ ID NO: 5498 - RNA, 22 nt, synthetic construct
  modified_base 22: mod_base = OTHER; note = thymine
  misc_feature 1..22: note = Antisense oligonucleotide
  modified_base 1: mod_base = OTHER; note = misc_feature - bicyclic nucleic acid scaffold modification
  modified_base 10: mod_base = OTHER; note = misc_feature - bicyclic nucleic acid scaffold modification
  modified_base 17: mod_base = OTHER; note = misc_feature - bicyclic nucleic acid scaffold modification
  modified_base 22: mod_base = OTHER; note = misc_feature - bicyclic nucleic acid scaffold modification
  source 1..22: mol_type = other RNA
ccctccttccatgactcaagct

SEQ ID NO: 5499 - RNA, 22 nt, synthetic construct
  modified_base 22: mod_base = OTHER; note = thymine
  misc_feature 1..22: note = Antisense oligonucleotide
  modified_base 1: mod_base = OTHER; note = misc_feature - bicyclic nucleic acid scaffold modification
  modified_base 6: mod_base = OTHER; note = misc_feature - bicyclic nucleic acid scaffold modification
  modified_base 15: mod_base = OTHER; note = misc_feature - bicyclic nucleic acid scaffold modification
  modified_base 22: mod_base = OTHER; note = misc_feature - bicyclic nucleic acid scaffold modification
  source 1..22: mol_type = other RNA
ccctccttccatgactcaagct

SEQ ID NO: 5500 - RNA, 22 nt, synthetic construct
  modified_base 22: mod_base = OTHER; note = thymine
  misc_feature 1..22: note = Antisense oligonucleotide
  modified_base 1: mod_base = OTHER; note = misc_feature - bicyclic nucleic acid scaffold modification
  modified_base 21..22: mod_base = OTHER; note = misc_feature - bicyclic nucleic acid scaffold modification
  source 1..22: mol_type = other RNA
ccctccttccatgactcaagct

SEQ ID NO: 5501 - RNA, 22 nt, synthetic construct
  modified_base 22: mod_base = OTHER; note = thymine
  misc_feature 1..22: note = Antisense oligonucleotide
  modified_base 1..2: mod_base = OTHER; note = misc_feature - bicyclic nucleic acid scaffold modification
  modified_base 21..22: mod_base = OTHER; note = misc_feature - bicyclic nucleic acid scaffold modification
  source 1..22: mol_type = other RNA
ccctccttccatgactcaagct

SEQ ID NO: 5502 - RNA, 22 nt, synthetic construct
  modified_base 22: mod_base = OTHER; note = thymine
  misc_feature 1..22: note = Antisense oligonucleotide
  modified_base 1: mod_base = OTHER; note = misc_feature - bicyclic nucleic acid scaffold modification
  modified_base 13: mod_base = OTHER; note = misc_feature - bicyclic nucleic acid scaffold modification
  modified_base 17: mod_base = OTHER; note = misc_feature - bicyclic nucleic acid scaffold modification
  modified_base 21..22: mod_base = OTHER; note = misc_feature - bicyclic nucleic acid scaffold modification
  source 1..22: mol_type = other RNA
ccctccttccatgactcaagct

SEQ ID NO: 5503 - RNA, 20 nt, synthetic construct
  misc_feature 1..20: note = Antisense oligonucleotide
  modified_base 1: mod_base = OTHER; note = misc_feature - bicyclic nucleic acid scaffold modification
  modified_base 20: mod_base = OTHER; note = misc_feature - bicyclic nucleic acid scaffold modification
  source 1..20: mol_type = other RNA
gaccctccttccatgactca

SEQ ID NO: 5504 - RNA, 20 nt, synthetic construct
  misc_feature 1..20: note = Antisense oligonucleotide
  modified_base 1: mod_base = OTHER; note = misc_feature - bicyclic nucleic acid scaffold modification
  modified_base 17: mod_base = OTHER; note = misc_feature - bicyclic nucleic acid scaffold modification
  modified_base 20: mod_base = OTHER; note = misc_feature - bicyclic nucleic acid scaffold modification
  source 1..20: mol_type = other RNA
gaccctccttccatgactca

SEQ ID NO: 5505 - RNA, 20 nt, synthetic construct
  misc_feature 1..20: note = Antisense oligonucleotide
  modified_base 1: mod_base = OTHER; note = misc_feature - bicyclic nucleic acid scaffold modification
  modified_base 15: mod_base = OTHER; note = misc_feature - bicyclic nucleic acid scaffold modification
  modified_base 20: mod_base = OTHER; note = misc_feature - bicyclic nucleic acid scaffold modification
  source 1..20: mol_type = other RNA
gaccctccttccatgactca

SEQ ID NO: 5506 - RNA, 20 nt, synthetic construct
  misc_feature 1..20: note = Antisense oligonucleotide
  modified_base 1: mod_base = OTHER; note = misc_feature - bicyclic nucleic acid scaffold modification
  modified_base 12: mod_base = OTHER; note = misc_feature - bicyclic nucleic acid scaffold modification
  modified_base 20: mod_base = OTHER; note = misc_feature - bicyclic nucleic acid scaffold modification
  source 1..20: mol_type = other RNA
gaccctccttccatgactca

SEQ ID NO: 5507 - RNA, 20 nt, synthetic construct
  misc_feature 1..20: note = Antisense oligonucleotide
  modified_base 1: mod_base = OTHER; note = misc_feature - bicyclic nucleic acid scaffold modification
  modified_base 8: mod_base = OTHER; note = misc_feature - bicyclic nucleic acid scaffold modification
  modified_base 20: mod_base = OTHER; note = misc_feature - bicyclic nucleic acid scaffold modification
  source 1..20: mol_type = other RNA
gaccctccttccatgactca

SEQ ID NO: 5508 - RNA, 20 nt, synthetic construct
  misc_feature 1..20: note = Antisense oligonucleotide
  modified_base 1: mod_base = OTHER; note = misc_feature - bicyclic nucleic acid scaffold modification
  modified_base 5: mod_base = OTHER; note = misc_feature - bicyclic nucleic acid scaffold modification
  modified_base 20: mod_base = OTHER; note = misc_feature - bicyclic nucleic acid scaffold modification
  source 1..20: mol_type = other RNA
gaccctccttccatgactca

SEQ ID NO: 5509 - RNA, 20 nt, synthetic construct
  misc_feature 1..20: note = Antisense oligonucleotide
  modified_base 1: mod_base = OTHER; note = misc_feature - bicyclic nucleic acid scaffold modification
  modified_base 8: mod_base = OTHER; note = misc_feature - bicyclic nucleic acid scaffold modification
  modified_base 15: mod_base = OTHER; note = misc_feature - bicyclic nucleic acid scaffold modification
  modified_base 20: mod_base = OTHER; note = misc_feature - bicyclic nucleic acid scaffold modification
  source 1..20: mol_type = other RNA
gaccctccttccatgactca

SEQ ID NO: 5510 - RNA, 20 nt, synthetic construct
  misc_feature 1..20: note = Antisense oligonucleotide
  modified_base 1: mod_base = OTHER; note = misc_feature - bicyclic nucleic acid scaffold modification
  modified_base 12: mod_base = OTHER; note = misc_feature - bicyclic nucleic acid scaffold modification
  modified_base 17: mod_base = OTHER; note = misc_feature - bicyclic nucleic acid scaffold modification
  modified_base 20: mod_base = OTHER; note = misc_feature - bicyclic nucleic acid scaffold modification
  source 1..20: mol_type = other RNA
gaccctccttccatgactca

SEQ ID NO: 5511 - RNA, 20 nt, synthetic construct
  misc_feature 1..20: note = Antisense oligonucleotide
  modified_base 1: mod_base = OTHER; note = misc_feature - bicyclic nucleic acid scaffold modification
  modified_base 5: mod_base = OTHER; note = misc_feature - bicyclic nucleic acid scaffold modification
  modified_base 12: mod_base = OTHER; note = misc_feature - bicyclic nucleic acid scaffold modification
  modified_base 20: mod_base = OTHER; note = misc_feature - bicyclic nucleic acid scaffold modification
  source 1..20: mol_type = other RNA
gaccctccttccatgactca

SEQ ID NO: 5512 - RNA, 20 nt, synthetic construct
  misc_feature 1..20: note = Antisense oligonucleotide
  modified_base 1: mod_base = OTHER; note = misc_feature - bicyclic nucleic acid scaffold modification
  modified_base 19..20: mod_base = OTHER; note = misc_feature - bicyclic nucleic acid scaffold modification
  source 1..20: mol_type = other RNA
gaccctccttccatgactca

SEQ ID NO: 5513 - RNA, 20 nt, synthetic construct
  misc_feature 1..20: note = Antisense oligonucleotide
  modified_base 1..2: mod_base = OTHER; note = misc_feature - bicyclic nucleic acid scaffold modification
  modified_base 19..20: mod_base = OTHER; note = misc_feature - bicyclic nucleic acid scaffold modification
  source 1..20: mol_type = other RNA
gaccctccttccatgactca

SEQ ID NO: 5514 - RNA, 20 nt, synthetic construct
  misc_feature 1..20: note = Antisense oligonucleotide
  modified_base 1..2: mod_base = OTHER; note = misc_feature - bicyclic nucleic acid scaffold modification
  modified_base 15: mod_base = OTHER; note = misc_feature - bicyclic nucleic acid scaffold modification
  modified_base 19..20: mod_base = OTHER; note = misc_feature - bicyclic nucleic acid scaffold modification
  source 1..20: mol_type = other RNA
gaccctccttccatgactca

SEQ ID NO: 5515 - RNA, 20 nt, synthetic construct
  misc_feature 1..20: note = Antisense oligonucleotide
  modified_base 1: mod_base = OTHER; note = misc_feature - bicyclic nucleic acid scaffold modification
  modified_base 12: mod_base = OTHER; note = misc_feature - bicyclic nucleic acid scaffold modification
  modified_base 17: mod_base = OTHER; note = misc_feature - bicyclic nucleic acid scaffold modification
  modified_base 19..20: mod_base = OTHER; note = misc_feature - bicyclic nucleic acid scaffold modification
  source 1..20: mol_type = other RNA
gaccctccttccatgactca

SEQ ID NO: 5516 - RNA, 20 nt, synthetic construct
  misc_feature 1..20: note = Antisense oligonucleotide
  modified_base 1: mod_base = OTHER; note = misc_feature - bicyclic nucleic acid scaffold modification
  modified_base 8: mod_base = OTHER; note = misc_feature - bicyclic nucleic acid scaffold modification
  modified_base 15: mod_base = OTHER; note = misc_feature - bicyclic nucleic acid scaffold modification
  modified_base 19..20: mod_base = OTHER; note = misc_feature - bicyclic nucleic acid scaffold modification
  source 1..20: mol_type = other RNA
gaccctccttccatgactca

SEQ ID NO: 5517 - RNA, 20 nt, synthetic construct
  misc_feature 1..20: note = Antisense oligonucleotide
  modified_base 1: mod_base = OTHER; note = misc_feature - bicyclic nucleic acid scaffold modification
  modified_base 20: mod_base = OTHER; note = misc_feature - bicyclic nucleic acid scaffold modification
  source 1..20: mol_type = other RNA
accctccttccatgactcaa

SEQ ID NO: 5518 - RNA, 20 nt, synthetic construct
  misc_feature 1..20: note = Antisense oligonucleotide
  modified_base 1: mod_base = OTHER; note = misc_feature - bicyclic nucleic acid scaffold modification
  modified_base 18: mod_base = OTHER; note = misc_feature - bicyclic nucleic acid scaffold modification
  modified_base 20: mod_base = OTHER; note = misc_feature - bicyclic nucleic acid scaffold modification
  source 1..20: mol_type = other RNA
accctccttccatgactcaa

SEQ ID NO: 5519 - RNA, 20 nt, synthetic construct
  misc_feature 1..20: note = Antisense oligonucleotide
  modified_base 1: mod_base = OTHER; note = misc_feature - bicyclic nucleic acid scaffold modification
  modified_base 16: mod_base = OTHER; note = misc_feature - bicyclic nucleic acid scaffold modification
  modified_base 20: mod_base = OTHER; note = misc_feature - bicyclic nucleic acid scaffold modification
  source 1..20: mol_type = other RNA
accctccttccatgactcaa

SEQ ID NO: 5520 - RNA, 20 nt, synthetic construct
  misc_feature 1..20: note = Antisense oligonucleotide
  modified_base 1: mod_base = OTHER; note = misc_feature - bicyclic nucleic acid scaffold modification
  modified_base 14: mod_base = OTHER; note = misc_feature - bicyclic nucleic acid scaffold modification
  modified_base 20: mod_base = OTHER; note = misc_feature - bicyclic nucleic acid scaffold modification
  source 1..20: mol_type = other RNA
accctccttccatgactcaa

SEQ ID NO: 5521 - RNA, 20 nt, synthetic construct
  misc_feature 1..20: note = Antisense oligonucleotide
  modified_base 1: mod_base = OTHER; note = misc_feature - bicyclic nucleic acid scaffold modification
  modified_base 11: mod_base = OTHER; note = misc_feature - bicyclic nucleic acid scaffold modification
  modified_base 20: mod_base = OTHER; note = misc_feature - bicyclic nucleic acid scaffold modification
  source 1..20: mol_type = other RNA
accctccttccatgactcaa

SEQ ID NO: 5522 - RNA, 20 nt, synthetic construct
  misc_feature 1..20: note = Antisense oligonucleotide
  modified_base 1: mod_base = OTHER; note = misc_feature - bicyclic nucleic acid scaffold modification
  modified_base 7: mod_base = OTHER; note = misc_feature - bicyclic nucleic acid scaffold modification
  modified_base 20: mod_base = OTHER; note = misc_feature - bicyclic nucleic acid scaffold modification
  source 1..20: mol_type = other RNA
accctccttccatgactcaa

SEQ ID NO: 5523 - RNA, 20 nt, synthetic construct
  misc_feature 1..20: note = Antisense oligonucleotide
  modified_base 1: mod_base = OTHER; note = misc_feature - bicyclic nucleic acid scaffold modification
  modified_base 4: mod_base = OTHER; note = misc_feature - bicyclic nucleic acid scaffold modification
  modified_base 20: mod_base = OTHER; note = misc_feature - bicyclic nucleic acid scaffold modification
  source 1..20: mol_type = other RNA
accctccttccatgactcaa

SEQ ID NO: 5524 - RNA, 20 nt, synthetic construct
  misc_feature 1..20: note = Antisense oligonucleotide
  modified_base 1: mod_base = OTHER; note = misc_feature - bicyclic nucleic acid scaffold modification
  modified_base 14: mod_base = OTHER; note = misc_feature - bicyclic nucleic acid scaffold modification
  modified_base 18: mod_base = OTHER; note = misc_feature - bicyclic nucleic acid scaffold modification
  modified_base 20: mod_base = OTHER; note = misc_feature - bicyclic nucleic acid scaffold modification
  source 1..20: mol_type = other RNA
accctccttccatgactcaa

SEQ ID NO: 5525 - RNA, 20 nt, synthetic construct
  misc_feature 1..20: note = Antisense oligonucleotide
  modified_base 1: mod_base = OTHER; note = misc_feature - bicyclic nucleic acid scaffold modification
  modified_base 11: mod_base = OTHER; note = misc_feature - bicyclic nucleic acid scaffold modification
  modified_base 16: mod_base = OTHER; note = misc_feature - bicyclic nucleic acid scaffold modification
  modified_base 20: mod_base = OTHER; note = misc_feature - bicyclic nucleic acid scaffold modification
  source 1..20: mol_type = other RNA
accctccttccatgactcaa

SEQ ID NO: 5526 - RNA, 20 nt, synthetic construct
  misc_feature 1..20: note = Antisense oligonucleotide
  modified_base 1: mod_base = OTHER; note = misc_feature - bicyclic nucleic acid scaffold modification
  modified_base 4: mod_base = OTHER; note = misc_feature - bicyclic nucleic acid scaffold modification
  modified_base 11: mod_base = OTHER; note = misc_feature - bicyclic nucleic acid scaffold modification
  modified_base 20: mod_base = OTHER; note = misc_feature - bicyclic nucleic acid scaffold modification
  source 1..20: mol_type = other RNA
accctccttccatgactcaa

SEQ ID NO: 5527 - RNA, 20 nt, synthetic construct
  misc_feature 1..20: note = Antisense oligonucleotide
  modified_base 1: mod_base = OTHER; note = misc_feature - bicyclic nucleic acid scaffold modification
  modified_base 18..20: mod_base = OTHER; note = misc_feature - bicyclic nucleic acid scaffold modification
  source 1..20: mol_type = other RNA
accctccttccatgactcaa

SEQ ID NO: 5528 - RNA, 20 nt, synthetic construct
  misc_feature 1..20: note = Antisense oligonucleotide
  modified_base 1..2: mod_base = OTHER; note = misc_feature - bicyclic nucleic acid scaffold modification
  modified_base 18: mod_base = OTHER; note = misc_feature - bicyclic nucleic acid scaffold modification
  modified_base 20: mod_base = OTHER; note = misc_feature - bicyclic nucleic acid scaffold modification
  source 1..20: mol_type = other RNA
accctccttccatgactcaa

SEQ ID NO: 5529 - RNA, 20 nt, synthetic construct
  misc_feature 1..20: note = Antisense oligonucleotide
  modified_base 1..2: mod_base = OTHER; note = misc_feature - bicyclic nucleic acid scaffold modification
  modified_base 19..20: mod_base = OTHER; note = misc_feature - bicyclic nucleic acid scaffold modification
  source 1..20: mol_type = other RNA
accctccttccatgactcaa

SEQ ID NO: 5530 - RNA, 20 nt, synthetic construct
  misc_feature 1..20: note = Antisense oligonucleotide
  modified_base 1..2: mod_base = OTHER; note = misc_feature - bicyclic nucleic acid scaffold modification
  modified_base 7: mod_base = OTHER; note = misc_feature - bicyclic nucleic acid scaffold modification
  modified_base 14: mod_base = OTHER; note = misc_feature - bicyclic nucleic acid scaffold modification
  modified_base 18..20: mod_base = OTHER; note = misc_feature - bicyclic nucleic acid scaffold modification
  source 1..20: mol_type = other RNA
accctccttccatgactcaa

SEQ ID NO: 5531 - RNA, 20 nt, synthetic construct
  misc_feature 1..20: note = Antisense oligonucleotide
  modified_base 1: mod_base = OTHER; note = misc_feature - bicyclic nucleic acid scaffold modification
  modified_base 20: mod_base = OTHER; note = misc_feature - bicyclic nucleic acid scaffold modification
  source 1..20: mol_type = other RNA
ccctccttccatgactcaag

SEQ ID NO: 5532 - RNA, 20 nt, synthetic construct
  misc_feature 1..20: note = Antisense oligonucleotide
  modified_base 1: mod_base = OTHER; note = misc_feature - bicyclic nucleic acid scaffold modification
  modified_base 17: mod_base = OTHER; note = misc_feature - bicyclic nucleic acid scaffold modification
  modified_base 20: mod_base = OTHER; note = misc_feature - bicyclic nucleic acid scaffold modification
  source 1..20: mol_type = other RNA
ccctccttccatgactcaag

SEQ ID NO: 5533 - RNA, 20 nt, synthetic construct
  misc_feature 1..20: note = Antisense oligonucleotide
  modified_base 1: mod_base = OTHER; note = misc_feature - bicyclic nucleic acid scaffold modification
  modified_base 15: mod_base = OTHER; note = misc_feature - bicyclic nucleic acid scaffold modification
  modified_base 20: mod_base = OTHER; note = misc_feature - bicyclic nucleic acid scaffold modification
  source 1..20: mol_type = other RNA
ccctccttccatgactcaag

SEQ ID NO: 5534 - RNA, 20 nt, synthetic construct
  misc_feature 1..20: note = Antisense oligonucleotide
  modified_base 1: mod_base = OTHER; note = misc_feature - bicyclic nucleic acid scaffold modification
  modified_base 13: mod_base = OTHER; note = misc_feature - bicyclic nucleic acid scaffold modification
  modified_base 20: mod_base = OTHER; note = misc_feature - bicyclic nucleic acid scaffold modification
  source 1..20: mol_type = other RNA
ccctccttccatgactcaag

SEQ ID NO: 5535 - RNA, 20 nt, synthetic construct
  misc_feature 1..20: note = Antisense oligonucleotide
  modified_base 1: mod_base = OTHER; note = misc_feature - bicyclic nucleic acid scaffold modification
  modified_base 10: mod_base = OTHER; note = misc_feature - bicyclic nucleic acid scaffold modification
  modified_base 20: mod_base = OTHER; note = misc_feature - bicyclic nucleic acid scaffold modification
  source 1..20: mol_type = other RNA
ccctccttccatgactcaag

SEQ ID NO: 5536 - RNA, 20 nt, synthetic construct
  misc_feature 1..20: note = Antisense oligonucleotide
  modified_base 1: mod_base = OTHER; note = misc_feature - bicyclic nucleic acid scaffold modification
  modified_base 6: mod_base = OTHER; note = misc_feature - bicyclic nucleic acid scaffold modification
  modified_base 20: mod_base = OTHER; note = misc_feature - bicyclic nucleic acid scaffold modification
  source 1..20: mol_type = other RNA
ccctccttccatgactcaag

SEQ ID NO: 5537 - RNA, 20 nt, synthetic construct
  misc_feature 1..20: note = Antisense oligonucleotide
  modified_base 1: mod_base = OTHER; note = misc_feature - bicyclic nucleic acid scaffold modification
  modified_base 3: mod_base = OTHER; note = misc_feature - bicyclic nucleic acid scaffold modification
  modified_base 20: mod_base = OTHER; note = misc_feature - bicyclic nucleic acid scaffold modification
  source 1..20: mol_type = other RNA
ccctccttccatgactcaag

SEQ ID NO: 5538 - RNA, 20 nt, synthetic construct
  misc_feature 1..20: note = Antisense oligonucleotide
  modified_base 1: mod_base = OTHER; note = misc_feature - bicyclic nucleic acid scaffold modification
  modified_base 13: mod_base = OTHER; note = misc_feature - bicyclic nucleic acid scaffold modification
  modified_base 17: mod_base = OTHER; note = misc_feature - bicyclic nucleic acid scaffold modification
  modified_base 20: mod_base = OTHER; note = misc_feature - bicyclic nucleic acid scaffold modification
  source 1..20: mol_type = other RNA
ccctccttccatgactcaag

SEQ ID NO: 5539 - RNA, 20 nt, synthetic construct
  misc_feature 1..20: note = Antisense oligonucleotide
  modified_base 1: mod_base = OTHER; note = misc_feature - bicyclic nucleic acid scaffold modification
  modified_base 10: mod_base = OTHER; note = misc_feature - bicyclic nucleic acid scaffold modification
  modified_base 15: mod_base = OTHER; note = misc_feature - bicyclic nucleic acid scaffold modification
  modified_base 20: mod_base = OTHER; note = misc_feature - bicyclic nucleic acid scaffold modification
  source 1..20: mol_type = other RNA
ccctccttccatgactcaag

SEQ ID NO: 5540 - RNA, 20 nt, synthetic construct
  misc_feature 1..20: note = Antisense oligonucleotide
  modified_base 1: mod_base = OTHER; note = misc_feature - bicyclic nucleic acid scaffold modification
  modified_base 20: mod_base = OTHER; note = misc_feature - bicyclic nucleic acid scaffold modification
  source 1..20: mol_type = other RNA
ccctccttccatgactcaag

SEQ ID NO: 5541 - RNA, 20 nt, synthetic construct
  misc_feature 1..20: note = Antisense oligonucleotide
  modified_base 1: mod_base = OTHER; note = misc_feature - bicyclic nucleic acid scaffold modification
  modified_base 6: mod_base = OTHER; note = misc_feature - bicyclic nucleic acid scaffold modification
  modified_base 10: mod_base = OTHER; note = misc_feature - bicyclic nucleic acid scaffold modification
  modified_base 20: mod_base = OTHER; note = misc_feature - bicyclic nucleic acid scaffold modification
  source 1..20: mol_type = other RNA
ccctccttccatgactcaag

SEQ ID NO: 5542 - RNA, 20 nt, synthetic construct
  misc_feature 1..20: note = Antisense oligonucleotide
  modified_base 1: mod_base = OTHER; note = misc_feature - bicyclic nucleic acid scaffold modification
  modified_base 19..20: mod_base = OTHER; note = misc_feature - bicyclic nucleic acid scaffold modification
  source 1..20: mol_type = other RNA
ccctccttccatgactcaag

SEQ ID NO: 5543 - RNA, 20 nt, synthetic construct
  misc_feature 1..20: note = Antisense oligonucleotide
  modified_base 1..2: mod_base = OTHER; note = misc_feature - bicyclic nucleic acid scaffold modification
  modified_base 19..20: mod_base = OTHER; note = misc_feature - bicyclic nucleic acid scaffold modification
  source 1..20: mol_type = other RNA
ccctccttccatgactcaag

SEQ ID NO: 5544 - RNA, 20 nt, synthetic construct
  misc_feature 1..20: note = Antisense oligonucleotide
  modified_base 1..2: mod_base = OTHER; note = misc_feature - bicyclic nucleic acid scaffold modification
  modified_base 6: mod_base = OTHER; note = misc_feature - bicyclic nucleic acid scaffold modification
  modified_base 13: mod_base = OTHER; note = misc_feature - bicyclic nucleic acid scaffold modification
  modified_base 19..20: mod_base = OTHER; note = misc_feature - bicyclic nucleic acid scaffold modification
  source 1..20: mol_type = other RNA
ccctccttccatgactcaag

SEQ ID NO: 5545 - RNA, 20 nt, synthetic construct
  misc_feature 1..20: note = Antisense oligonucleotide
  modified_base 1: mod_base = OTHER; note = misc_feature - bicyclic nucleic acid scaffold modification
  modified_base 20: mod_base = OTHER; note = misc_feature - bicyclic nucleic acid scaffold modification
  source 1..20: mol_type = other RNA
cctccttccatgactcaagc

SEQ ID NO: 5546 - RNA, 20 nt, synthetic construct
  misc_feature 1..20: note = Antisense oligonucleotide
  modified_base 1: mod_base = OTHER; note = misc_feature - bicyclic nucleic acid scaffold modification
  modified_base 19..20: mod_base = OTHER; note = misc_feature - bicyclic nucleic acid scaffold modification
  source 1..20: mol_type = other RNA
cctccttccatgactcaagc

SEQ ID NO: 5547 - RNA, 20 nt, synthetic construct
  misc_feature 1..20: note = Antisense oligonucleotide
  modified_base 1: mod_base = OTHER; note = misc_feature - bicyclic nucleic acid scaffold modification
  modified_base 16: mod_base = OTHER; note = misc_feature - bicyclic nucleic acid scaffold modification
  modified_base 20: mod_base = OTHER; note = misc_feature - bicyclic nucleic acid scaffold modification
  source 1..20: mol_type = other RNA
cctccttccatgactcaagc

SEQ ID NO: 5548 - RNA, 20 nt, synthetic construct
  misc_feature 1..20: note = Antisense oligonucleotide
  modified_base 1: mod_base = OTHER; note = misc_feature - bicyclic nucleic acid scaffold modification
  modified_base 14: mod_base = OTHER; note = misc_feature - bicyclic nucleic acid scaffold modification
  modified_base 20: mod_base = OTHER; note = misc_feature - bicyclic nucleic acid scaffold modification
  source 1..20: mol_type = other RNA
cctccttccatgactcaagc

SEQ ID NO: 5549 - RNA, 20 nt, synthetic construct
  misc_feature 1..20: note = Antisense oligonucleotide
  modified_base 1: mod_base = OTHER; note = misc_feature - bicyclic nucleic acid scaffold modification
  modified_base 12: mod_base = OTHER; note = misc_feature - bicyclic nucleic acid scaffold modification
  modified_base 20: mod_base = OTHER; note = misc_feature - bicyclic nucleic acid scaffold modification
  source 1..20: mol_type = other RNA
cctccttccatgactcaagc

SEQ ID NO: 5550 - RNA, 20 nt, synthetic construct
  misc_feature 1..20: note = Antisense oligonucleotide
  modified_base 1: mod_base = OTHER; note = misc_feature - bicyclic nucleic acid scaffold modification
  modified_base 9: mod_base = OTHER; note = misc_feature - bicyclic nucleic acid scaffold modification
  modified_base 20: mod_base = OTHER; note = misc_feature - bicyclic nucleic acid scaffold modification
  source 1..20: mol_type = other RNA
cctccttccatgactcaagc

SEQ ID NO: 5551 - RNA, 20 nt, synthetic construct
  misc_feature 1..20: note = Antisense oligonucleotide
  modified_base 1: mod_base = OTHER; note = misc_feature - bicyclic nucleic acid scaffold modification
  modified_base 5: mod_base = OTHER; note = misc_feature - bicyclic nucleic acid scaffold modification
  modified_base 20: mod_base = OTHER; note = misc_feature - bicyclic nucleic acid scaffold modification
  source 1..20: mol_type = other RNA
cctccttccatgactcaagc

SEQ ID NO: 5552 - RNA, 20 nt, synthetic construct
  misc_feature 1..20: note = Antisense oligonucleotide
  modified_base 1..2: mod_base = OTHER; note = misc_feature - bicyclic nucleic acid scaffold modification
  modified_base 20: mod_base = OTHER; note = misc_feature - bicyclic nucleic acid scaffold modification
  source 1..20: mol_type = other RNA
cctccttccatgactcaagc

SEQ ID NO: 5553 - RNA, 20 nt, synthetic construct
  misc_feature 1..20: note = Antisense oligonucleotide
  modified_base 1: mod_base = OTHER; note = misc_feature - bicyclic nucleic acid scaffold modification
  modified_base 12: mod_base = OTHER; note = misc_feature - bicyclic nucleic acid scaffold modification
  modified_base 19..20: mod_base = OTHER; note = misc_feature - bicyclic nucleic acid scaffold modification
  source 1..20: mol_type = other RNA
cctccttccatgactcaagc

SEQ ID NO: 5554 - RNA, 20 nt, synthetic construct
  misc_feature 1..20: note = Antisense oligonucleotide
  modified_base 1: mod_base = OTHER; note = misc_feature - bicyclic nucleic acid scaffold modification
  modified_base 9: mod_base = OTHER; note = misc_feature - bicyclic nucleic acid scaffold modification
  modified_base 16: mod_base = OTHER; note = misc_feature - bicyclic nucleic acid scaffold modification
  modified_base 20: mod_base = OTHER; note = misc_feature - bicyclic nucleic acid scaffold modification
  source 1..20: mol_type = other RNA
cctccttccatgactcaagc

SEQ ID NO: 5555 - RNA, 20 nt, synthetic construct
  misc_feature 1..20: note = Antisense oligonucleotide
  modified_base 1: mod_base = OTHER; note = misc_feature - bicyclic nucleic acid scaffold modification
  modified_base 5: mod_base = OTHER; note = misc_feature - bicyclic nucleic acid scaffold modification
  modified_base 9: mod_base = OTHER; note = misc_feature - bicyclic nucleic acid scaffold modification
  modified_base 20: mod_base = OTHER; note = misc_feature - bicyclic nucleic acid scaffold modification
  source 1..20: mol_type = other RNA
cctccttccatgactcaagc

SEQ ID NO: 5556 - RNA, 20 nt, synthetic construct
  misc_feature 1..20: note = Antisense oligonucleotide
  modified_base 1..2: mod_base = OTHER; note = misc_feature - bicyclic nucleic acid scaffold modification
  modified_base 19..20: mod_base = OTHER; note = misc_feature - bicyclic nucleic acid scaffold modification
  source 1..20: mol_type = other RNA
cctccttccatgactcaagc

SEQ ID NO: 5557 - RNA, 20 nt, synthetic construct
  misc_feature 1..20: note = Antisense oligonucleotide
  modified_base 1: mod_base = OTHER; note = misc_feature - bicyclic nucleic acid scaffold modification
  modified_base 12: mod_base = OTHER; note = misc_feature - bicyclic nucleic acid scaffold modification
  modified_base 16: mod_base = OTHER; note = misc_feature - bicyclic nucleic acid scaffold modification
  modified_base 19..20: mod_base = OTHER; note = misc_feature - bicyclic nucleic acid scaffold modification
  source 1..20: mol_type = other RNA
cctccttccatgactcaagc

SEQ ID NO: 5558 - RNA, 20 nt, synthetic construct
  misc_feature 1..20: note = Antisense oligonucleotide
  modified_base 1: mod_base = OTHER; note = misc_feature - bicyclic nucleic acid scaffold modification
  modified_base 9: mod_base = OTHER; note = misc_feature - bicyclic nucleic acid scaffold modification
  modified_base 14: mod_base = OTHER; note = misc_feature - bicyclic nucleic acid scaffold modification
  modified_base 19..20: mod_base = OTHER; note = misc_feature - bicyclic nucleic acid scaffold modification
  source 1..20: mol_type = other RNA
cctccttccatgactcaagc

SEQ ID NO: 5559 - RNA, 20 nt, synthetic construct
  modified_base 20: mod_base = OTHER; note = thymine
  misc_feature 1..20: note = Antisense oligonucleotide
  modified_base 1: mod_base = OTHER; note = misc_feature - bicyclic nucleic acid scaffold modification
  modified_base 20: mod_base = OTHER; note = misc_feature - bicyclic nucleic acid scaffold modification
  source 1..20: mol_type = other RNA
ctccttccatgactcaagct

SEQ ID NO: 5560 - RNA, 20 nt, synthetic construct
  modified_base 20: mod_base = OTHER; note = thymine
  misc_feature 1..20: note = Antisense oligonucleotide
  modified_base 1: mod_base = OTHER; note = misc_feature - bicyclic nucleic acid scaffold modification
  modified_base 18: mod_base = OTHER; note = misc_feature - bicyclic nucleic acid scaffold modification
  modified_base 20: mod_base = OTHER; note = misc_feature - bicyclic nucleic acid scaffold modification
  source 1..20: mol_type = other RNA
ctccttccatgactcaagct

SEQ ID NO: 5561 - RNA, 20 nt, synthetic construct
  modified_base 20: mod_base = OTHER; note = thymine
  misc_feature 1..20: note = Antisense oligonucleotide
  modified_base 1: mod_base = OTHER; note = misc_feature - bicyclic nucleic acid scaffold modification
  modified_base 15: mod_base = OTHER; note = misc_feature - bicyclic nucleic acid scaffold modification
  modified_base 20: mod_base = OTHER; note = misc_feature - bicyclic nucleic acid scaffold modification
  source 1..20: mol_type = other RNA
ctccttccatgactcaagct

SEQ ID NO: 5562 - RNA, 20 nt, synthetic construct
  modified_base 20: mod_base = OTHER; note = thymine
  misc_feature 1..20: note = Antisense oligonucleotide
  modified_base 1: mod_base = OTHER; note = misc_feature - bicyclic nucleic acid scaffold modification
  modified_base 13: mod_base = OTHER; note = misc_feature - bicyclic nucleic acid scaffold modification
  modified_base 20: mod_base = OTHER; note = misc_feature - bicyclic nucleic acid scaffold modification
  source 1..20: mol_type = other RNA
ctccttccatgactcaagct

SEQ ID NO: 5563 - RNA, 20 nt, synthetic construct
  modified_base 20: mod_base = OTHER; note = thymine
  misc_feature 1..20: note = Antisense oligonucleotide
  modified_base 1: mod_base = OTHER; note = misc_feature - bicyclic nucleic acid scaffold modification
  modified_base 11: mod_base = OTHER; note = misc_feature - bicyclic nucleic acid scaffold modification
  modified_base 20: mod_base = OTHER; note = misc_feature - bicyclic nucleic acid scaffold modification
  source 1..20: mol_type = other RNA
ctccttccatgactcaagct

SEQ ID NO: 5564 - RNA, 20 nt, synthetic construct
  modified_base 20: mod_base = OTHER; note = thymine
  misc_feature 1..20: note = Antisense oligonucleotide
  modified_base 1: mod_base = OTHER; note = misc_feature - bicyclic nucleic acid scaffold modification
  modified_base 8: mod_base = OTHER; note = misc_feature - bicyclic nucleic acid scaffold modification
  modified_base 20: mod_base = OTHER; note = misc_feature - bicyclic nucleic acid scaffold modification
  source 1..20: mol_type = other RNA
ctccttccatgactcaagct

SEQ ID NO: 5565 - RNA, 20 nt, synthetic construct
  modified_base 20: mod_base = OTHER; note = thymine
  misc_feature 1..20: note = Antisense oligonucleotide
  modified_base 1: mod_base = OTHER; note = misc_feature - bicyclic nucleic acid scaffold modification
  modified_base 4: mod_base = OTHER; note = misc_feature - bicyclic nucleic acid scaffold modification
  modified_base 20: mod_base = OTHER; note = misc_feature - bicyclic nucleic acid scaffold modification
  source 1..20: mol_type = other RNA
ctccttccatgactcaagct

SEQ ID NO: 5566 - RNA, 20 nt, synthetic construct
  modified_base 20: mod_base = OTHER; note = thymine
  misc_feature 1..20: note = Antisense oligonucleotide
  modified_base 1: mod_base = OTHER; note = misc_feature - bicyclic nucleic acid scaffold modification
  modified_base 11: mod_base = OTHER; note = misc_feature - bicyclic nucleic acid scaffold modification
  modified_base 18: mod_base = OTHER; note = misc_feature - bicyclic nucleic acid scaffold modification
  modified_base 20: mod_base = OTHER; note = misc_feature - bicyclic nucleic acid scaffold modification
  source 1..20: mol_type = other RNA
ctccttccatgactcaagct

SEQ ID NO: 5567 - RNA, 20 nt, synthetic construct
  modified_base 20: mod_base = OTHER; note = thymine
  misc_feature 1..20: note = Antisense oligonucleotide
  modified_base 1: mod_base = OTHER; note = misc_feature - bicyclic nucleic acid scaffold modification
  modified_base 8: mod_base = OTHER; note = misc_feature - bicyclic nucleic acid scaffold modification
  modified_base 15: mod_base = OTHER; note = misc_feature - bicyclic nucleic acid scaffold modification
  modified_base 20: mod_base = OTHER; note = misc_feature - bicyclic nucleic acid scaffold modification
  source 1..20: mol_type = other RNA
ctccttccatgactcaagct

SEQ ID NO: 5568 - RNA, 20 nt, synthetic construct
  modified_base 20: mod_base = OTHER; note = thymine
  misc_feature 1..20: note = Antisense oligonucleotide
  modified_base 1: mod_base = OTHER; note = misc_feature - bicyclic nucleic acid scaffold modification
  modified_base 7: mod_base = OTHER; note = misc_feature - bicyclic nucleic acid scaffold modification
  modified_base 13: mod_base = OTHER; note = misc_feature - bicyclic nucleic acid scaffold modification
  modified_base 20: mod_base = OTHER; note = misc_feature - bicyclic nucleic acid scaffold modification
  source 1..20: mol_type = other RNA
ctccttccatgactcaagct

SEQ ID NO: 5569 - RNA, 20 nt, synthetic construct
  modified_base 20: mod_base = OTHER; note = thymine
  misc_feature 1..20: note = Antisense oligonucleotide
  modified_base 1: mod_base = OTHER; note = misc_feature - bicyclic nucleic acid scaffold modification
  modified_base 19..20: mod_base = OTHER; note = misc_feature - bicyclic nucleic acid scaffold modification
  source 1..20: mol_type = other RNA
ctccttccatgactcaagct

SEQ ID NO: 5570 - RNA, 20 nt, synthetic construct
  modified_base 2: mod_base = OTHER; note = thymine
  modified_base 20: mod_base = OTHER; note = thymine
  misc_feature 1..20: note = Antisense oligonucleotide
  modified_base 1..2: mod_base = OTHER; note = misc_feature - bicyclic nucleic acid scaffold modification
  modified_base 19..20: mod_base = OTHER; note = misc_feature - bicyclic nucleic acid scaffold modification
  source 1..20: mol_type = other RNA
ctccttccatgactcaagct

SEQ ID NO: 5571 - RNA, 20 nt, synthetic construct
  modified_base 20: mod_base = OTHER; note = thymine
  misc_feature 1..20: note = Antisense oligonucleotide
  modified_base 1: mod_base = OTHER; note = misc_feature - bicyclic nucleic acid scaffold modification
  modified_base 11: mod_base = OTHER; note = misc_feature - bicyclic nucleic acid scaffold modification
  modified_base 15: mod_base = OTHER; note = misc_feature - bicyclic nucleic acid scaffold modification
  modified_base 19..20: mod_base = OTHER; note = misc_feature - bicyclic nucleic acid scaffold modification
  source 1..20: mol_type = other RNA
ctccttccatgactcaagct

SEQ ID NO: 5572 - RNA, 20 nt, synthetic construct
  modified_base 20: mod_base = OTHER; note = thymine
  misc_feature 1..20: note = Antisense oligonucleotide
  modified_base 1: mod_base = OTHER; note = misc_feature - bicyclic nucleic acid scaffold modification
  modified_base 11: mod_base = OTHER; note = misc_feature - bicyclic nucleic acid scaffold modification
  modified_base 15: mod_base = OTHER; note = misc_feature - bicyclic nucleic acid scaffold modification
  modified_base 18..20: mod_base = OTHER; note = misc_feature - bicyclic nucleic acid scaffold modification
  source 1..20: mol_type = other RNA
ctccttccatgactcaagct

SEQ ID NO: 5573 - RNA, 18 nt, synthetic construct
  modified_base 18: mod_base = OTHER; note = thymine
  misc_feature 1..18: note = Antisense oligonucleotide
  modified_base 1: mod_base = OTHER; note = misc_feature - bicyclic nucleic acid scaffold modification
  modified_base 18: mod_base = OTHER; note = misc_feature - bicyclic nucleic acid scaffold modification
  source 1..18: mol_type = other RNA
gaccctccttccatgact

SEQ ID NO: 5574 - RNA, 18 nt, synthetic construct
  modified_base 18: mod_base = OTHER; note = thymine
  misc_feature 1..18: note = Antisense oligonucleotide
  modified_base 1: mod_base = OTHER; note = misc_feature - bicyclic nucleic acid scaffold modification
  modified_base 15: mod_base = OTHER; note = misc_feature - bicyclic nucleic acid scaffold modification
  modified_base 18: mod_base = OTHER; note = misc_feature - bicyclic nucleic acid scaffold modification
  source 1..18: mol_type = other RNA
gaccctccttccatgact

SEQ ID NO: 5575 - RNA, 18 nt, synthetic construct
  modified_base 18: mod_base = OTHER; note = thymine
  misc_feature 1..18: note = Antisense oligonucleotide
  modified_base 1: mod_base = OTHER; note = misc_feature - bicyclic nucleic acid scaffold modification
  modified_base 12: mod_base = OTHER; note = misc_feature - bicyclic nucleic acid scaffold modification
  modified_base 18: mod_base = OTHER; note = misc_feature - bicyclic nucleic acid scaffold modification
  source 1..18: mol_type = other RNA
gaccctccttccatgact

SEQ ID NO: 5576 - RNA, 18 nt, synthetic construct
  modified_base 18: mod_base = OTHER; note = thymine
  misc_feature 1..18: note = Antisense oligonucleotide
  modified_base 1: mod_base = OTHER; note = misc_feature - bicyclic nucleic acid scaffold modification
  modified_base 8: mod_base = OTHER; note = misc_feature - bicyclic nucleic acid scaffold modification
  modified_base 18: mod_base = OTHER; note = misc_feature - bicyclic nucleic acid scaffold modification
  source 1..18: mol_type = other RNA
gaccctccttccatgact

SEQ ID NO: 5577 - RNA, 18 nt, synthetic construct
  modified_base 18: mod_base = OTHER; note = thymine
  misc_feature 1..18: note = Antisense oligonucleotide
  modified_base 1: mod_base = OTHER; note = misc_feature - bicyclic nucleic acid scaffold modification
  modified_base 5: mod_base = OTHER; note = misc_feature - bicyclic nucleic acid scaffold modification
  modified_base 18: mod_base = OTHER; note = misc_feature - bicyclic nucleic acid scaffold modification
  source 1..18: mol_type = other RNA
gaccctccttccatgact

SEQ ID NO: 5578 - RNA, 18 nt, synthetic construct
  modified_base 18: mod_base = OTHER; note = thymine
  misc_feature 1..18: note = Antisense oligonucleotide
  modified_base 1: mod_base = OTHER; note = misc_feature - bicyclic nucleic acid scaffold modification
  modified_base 8: mod_base = OTHER; note = misc_feature - bicyclic nucleic acid scaffold modification
  modified_base 15: mod_base = OTHER; note = misc_feature - bicyclic nucleic acid scaffold modification
  modified_base 18: mod_base = OTHER; note = misc_feature - bicyclic nucleic acid scaffold modification
  source 1..18: mol_type = other RNA
gaccctccttccatgact

SEQ ID NO: 5579 - RNA, 18 nt, synthetic construct
  modified_base 18: mod_base = OTHER; note = thymine
  misc_feature 1..18: note = Antisense oligonucleotide
  modified_base 1: mod_base = OTHER; note = misc_feature - bicyclic nucleic acid scaffold modification
  modified_base 5: mod_base = OTHER; note = misc_feature - bicyclic nucleic acid scaffold modification
  modified_base 12: mod_base = OTHER; note = misc_feature - bicyclic nucleic acid scaffold modification
  modified_base 18: mod_base = OTHER; note = misc_feature - bicyclic nucleic acid scaffold modification
  source 1..18: mol_type = other RNA
gaccctccttccatgact

SEQ ID NO: 5580 - RNA, 18 nt, synthetic construct
  modified_base 18: mod_base = OTHER; note = thymine
  misc_feature 1..18: note = Antisense oligonucleotide
  modified_base 1: mod_base = OTHER; note = misc_feature - bicyclic nucleic acid scaffold modification
  modified_base 17..18: mod_base = OTHER; note = misc_feature - bicyclic nucleic acid scaffold modification
  source 1..18: mol_type = other RNA
gaccctccttccatgact

SEQ ID NO: 5581 - RNA, 18 nt, synthetic construct
  modified_base 18: mod_base = OTHER; note = thymine
  misc_feature 1..18: note = Antisense oligonucleotide
  modified_base 1: mod_base = OTHER; note = misc_feature - bicyclic nucleic acid scaffold modification
  modified_base 12: mod_base = OTHER; note = misc_feature - bicyclic nucleic acid scaffold modification
  modified_base 15: mod_base = OTHER; note = misc_feature - bicyclic nucleic acid scaffold modification
  modified_base 17..18: mod_base = OTHER; note = misc_feature - bicyclic nucleic acid scaffold modification
  source 1..18: mol_type = other RNA
gaccctccttccatgact

SEQ ID NO: 5582 - RNA, 18 nt, synthetic construct
  modified_base 18: mod_base = OTHER; note = thymine
  misc_feature 1..18: note = Antisense oligonucleotide
  modified_base 1..2: mod_base = OTHER; note = misc_feature - bicyclic nucleic acid scaffold modification
  modified_base 12: mod_base = OTHER; note = misc_feature - bicyclic nucleic acid scaffold modification
  modified_base 17..18: mod_base = OTHER; note = misc_feature - bicyclic nucleic acid scaffold modification
  source 1..18: mol_type = other RNA
gaccctccttccatgact

SEQ ID NO: 5583 - RNA, 18 nt, synthetic construct
  modified_base 18: mod_base = OTHER; note = thymine
  misc_feature 1..18: note = Antisense oligonucleotide
  modified_base 1..2: mod_base = OTHER; note = misc_feature - bicyclic nucleic acid scaffold modification
  modified_base 8: mod_base = OTHER; note = misc_feature - bicyclic nucleic acid scaffold modification
  modified_base 17..18: mod_base = OTHER; note = misc_feature - bicyclic nucleic acid scaffold modification
  source 1..18: mol_type = other RNA
gaccctccttccatgact

SEQ ID NO: 5584 - RNA, 18 nt, synthetic construct
  misc_feature 1..18: note = Antisense oligonucleotide
  modified_base 1: mod_base = OTHER; note = misc_feature - bicyclic nucleic acid scaffold modification
  modified_base 18: mod_base = OTHER; note = misc_feature - bicyclic nucleic acid scaffold modification
  source 1..18: mol_type = other RNA
accctccttccatgactc

SEQ ID NO: 5585 - RNA, 18 nt, synthetic construct
  misc_feature 1..18: note = Antisense oligonucleotide
  modified_base 1: mod_base = OTHER; note = misc_feature - bicyclic nucleic acid scaffold modification
  modified_base 16: mod_base = OTHER; note = misc_feature - bicyclic nucleic acid scaffold modification
  modified_base 18: mod_base = OTHER; note = misc_feature - bicyclic nucleic acid scaffold modification
  source 1..18: mol_type = other RNA
accctccttccatgactc

SEQ ID NO: 5586 - RNA, 18 nt, synthetic construct
  misc_feature 1..18: note = Antisense oligonucleotide
  modified_base 1: mod_base = OTHER; note = misc_feature - bicyclic nucleic acid scaffold modification
  modified_base 14: mod_base = OTHER; note = misc_feature - bicyclic nucleic acid scaffold modification
  modified_base 18: mod_base = OTHER; note = misc_feature - bicyclic nucleic acid scaffold modification
  source 1..18: mol_type = other RNA
accctccttccatgactc

SEQ ID NO: 5587 - RNA, 18 nt, synthetic construct
  misc_feature 1..18: note = Antisense oligonucleotide
  modified_base 1: mod_base = OTHER; note = misc_feature - bicyclic nucleic acid scaffold modification
  modified_base 11: mod_base = OTHER; note = misc_feature - bicyclic nucleic acid scaffold modification
  modified_base 18: mod_base = OTHER; note = misc_feature - bicyclic nucleic acid scaffold modification
  source 1..18: mol_type = other RNA
accctccttccatgactc

SEQ ID NO: 5588 - RNA, 18 nt, synthetic construct
  misc_feature 1..18: note = Antisense oligonucleotide
  modified_base 1: mod_base = OTHER; note = misc_feature - bicyclic nucleic acid scaffold modification
  modified_base 18: mod_base = OTHER; note = misc_feature - bicyclic nucleic acid scaffold modification
  source 1..18: mol_type = other RNA
accctccttccatgactc

SEQ ID NO: 5589 - RNA, 18 nt, synthetic construct
  misc_feature 1..18: note = Antisense oligonucleotide
  modified_base 1: mod_base = OTHER; note = misc_feature - bicyclic nucleic acid scaffold modification
  modified_base 7: mod_base = OTHER; note = misc_feature - bicyclic nucleic acid scaffold modification
  modified_base 18: mod_base = OTHER; note = misc_feature - bicyclic nucleic acid scaffold modification
  source 1..18: mol_type = other RNA
accctccttccatgactc

SEQ ID NO: 5590 - RNA, 18 nt, synthetic construct
  misc_feature 1..18: note = Antisense oligonucleotide
  modified_base 1: mod_base = OTHER; note = misc_feature - bicyclic nucleic acid scaffold modification
  modified_base 4: mod_base = OTHER; note = misc_feature - bicyclic nucleic acid scaffold modification
  modified_base 18: mod_base = OTHER; note = misc_feature - bicyclic nucleic acid scaffold modification
  source 1..18: mol_type = other RNA
accctccttccatgactc

SEQ ID NO: 5591 - RNA, 18 nt, synthetic construct
  misc_feature 1..18: note = Antisense oligonucleotide
  modified_base 1: mod_base = OTHER; note = misc_feature - bicyclic nucleic acid scaffold modification
  modified_base 7: mod_base = OTHER; note = misc_feature - bicyclic nucleic acid scaffold modification
  modified_base 16: mod_base = OTHER; note = misc_feature - bicyclic nucleic acid scaffold modification
  modified_base 18: mod_base = OTHER; note = misc_feature - bicyclic nucleic acid scaffold modification
  source 1..18: mol_type = other RNA
accctccttccatgactc

SEQ ID NO: 5592 - RNA, 18 nt, synthetic construct
  misc_feature 1..18: note = Antisense oligonucleotide
  modified_base 1: mod_base = OTHER; note = misc_feature - bicyclic nucleic acid scaffold modification
  modified_base 4: mod_base = OTHER; note = misc_feature - bicyclic nucleic acid scaffold modification
  modified_base 14: mod_base = OTHER; note = misc_feature - bicyclic nucleic acid scaffold modification
  modified_base 18: mod_base = OTHER; note = misc_feature - bicyclic nucleic acid scaffold modification
  source 1..18: mol_type = other RNA
accctccttccatgactc

SEQ ID NO: 5593 - RNA, 18 nt, synthetic construct
  modified_base 17: mod_base = OTHER; note = thymine
  misc_feature 1..18: note = Antisense oligonucleotide
  modified_base 1: mod_base = OTHER; note = misc_feature - bicyclic nucleic acid scaffold modification
  modified_base 17..18: mod_base = OTHER; note = misc_feature - bicyclic nucleic acid scaffold modification
  source 1..18: mol_type = other RNA
accctccttccatgactc

SEQ ID NO: 5594 - RNA, 18 nt, synthetic construct
  modified_base 17: mod_base = OTHER; note = thymine
  misc_feature 1..18: note = Antisense oligonucleotide
  modified_base 1..2: mod_base = OTHER; note = misc_feature - bicyclic nucleic acid scaffold modification
  modified_base 17..18: mod_base = OTHER; note = misc_feature - bicyclic nucleic acid scaffold modification
  source 1..18: mol_type = other RNA
accctccttccatgactc

SEQ ID NO: 5595 - RNA, 18 nt, synthetic construct
  modified_base 17: mod_base = OTHER; note = thymine
  misc_feature 1..18: note = Antisense oligonucleotide
  modified_base 1..2: mod_base = OTHER; note = misc_feature - bicyclic nucleic acid scaffold modification
  modified_base 14: mod_base = OTHER; note = misc_feature - bicyclic nucleic acid scaffold modification
  modified_base 17..18: mod_base = OTHER; note = misc_feature - bicyclic nucleic acid scaffold modification
  source 1..18: mol_type = other RNA
accctccttccatgactc

SEQ ID NO: 5596 - RNA, 18 nt, synthetic construct
  modified_base 17: mod_base = OTHER; note = thymine
  misc_feature 1..18: note = Antisense oligonucleotide
  modified_base 1..2: mod_base = OTHER; note = misc_feature - bicyclic nucleic acid scaffold modification
  modified_base 7: mod_base = OTHER; note = misc_feature - bicyclic nucleic acid scaffold modification
  modified_base 14: mod_base = OTHER; note = misc_feature - bicyclic nucleic acid scaffold modification
  modified_base 17..18: mod_base = OTHER; note = misc_feature - bicyclic nucleic acid scaffold modification
  source 1..18: mol_type = other RNA
accctccttccatgactc

SEQ ID NO: 5597 - RNA, 18 nt, synthetic construct
  misc_feature 1..18: note = Antisense oligonucleotide
  modified_base 1: mod_base = OTHER; note = misc_feature - bicyclic nucleic acid scaffold modification
  modified_base 18: mod_base = OTHER; note = misc_feature - bicyclic nucleic acid scaffold modification
  source 1..18: mol_type = other RNA
ccctccttccatgactca

SEQ ID NO: 5598 - RNA, 18 nt, synthetic construct
  misc_feature 1..18: note = Antisense oligonucleotide
  modified_base 1: mod_base = OTHER; note = misc_feature - bicyclic nucleic acid scaffold modification
  modified_base 15: mod_base = OTHER; note = misc_feature - bicyclic nucleic acid scaffold modification
  modified_base 18: mod_base = OTHER; note = misc_feature - bicyclic nucleic acid scaffold modification
  source 1..18: mol_type = other RNA
ccctccttccatgactca

SEQ ID NO: 5599 - RNA, 18 nt, synthetic construct
  misc_feature 1..18: note = Antisense oligonucleotide
  modified_base 1: mod_base = OTHER; note = misc_feature - bicyclic nucleic acid scaffold modification
  modified_base 13: mod_base = OTHER; note = misc_feature - bicyclic nucleic acid scaffold modification
  modified_base 18: mod_base = OTHER; note = misc_feature - bicyclic nucleic acid scaffold modification
  source 1..18: mol_type = other RNA
ccctccttccatgactca

SEQ ID NO: 5600 - RNA, 18 nt, synthetic construct
  misc_feature 1..18: note = Antisense oligonucleotide
  modified_base 1: mod_base = OTHER; note = misc_feature - bicyclic nucleic acid scaffold modification
  modified_base 10: mod_base = OTHER; note = misc_feature - bicyclic nucleic acid scaffold modification
  modified_base 18: mod_base = OTHER; note = misc_feature - bicyclic nucleic acid scaffold modification
  source 1..18: mol_type = other RNA
ccctccttccatgactca

SEQ ID NO: 5601 - RNA, 18 nt, synthetic construct
  misc_feature 1..18: note = Antisense oligonucleotide
  modified_base 1: mod_base = OTHER; note = misc_feature - bicyclic nucleic acid scaffold modification
  modified_base 6: mod_base = OTHER; note = misc_feature - bicyclic nucleic acid scaffold modification
  modified_base 18: mod_base = OTHER; note = misc_feature - bicyclic nucleic acid scaffold modification
  source 1..18: mol_type = other RNA
ccctccttccatgactca

SEQ ID NO: 5602 - RNA, 18 nt, synthetic construct
  misc_feature 1..18: note = Antisense oligonucleotide
  modified_base 1: mod_base = OTHER; note = misc_feature - bicyclic nucleic acid scaffold modification
  modified_base 3: mod_base = OTHER; note = misc_feature - bicyclic nucleic acid scaffold modification
  modified_base 18: mod_base = OTHER; note = misc_feature - bicyclic nucleic acid scaffold modification
  source 1..18: mol_type = other RNA
ccctccttccatgactca

SEQ ID NO: 5603 - RNA, 18 nt, synthetic construct
  misc_feature 1..18: note = Antisense oligonucleotide
  modified_base 1: mod_base = OTHER; note = misc_feature - bicyclic nucleic acid scaffold modification
  modified_base 10: mod_base = OTHER; note = misc_feature - bicyclic nucleic acid scaffold modification
  modified_base 17..18: mod_base = OTHER; note = misc_feature - bicyclic nucleic acid scaffold modification
  source 1..18: mol_type = other RNA
ccctccttccatgactca

SEQ ID NO: 5604 - RNA, 18 nt, synthetic construct
  misc_feature 1..18: note = Antisense oligonucleotide
  modified_base 1: mod_base = OTHER; note = misc_feature - bicyclic nucleic acid scaffold modification
  modified_base 6: mod_base = OTHER; note = misc_feature - bicyclic nucleic acid scaffold modification
  modified_base 15: mod_base = OTHER; note = misc_feature - bicyclic nucleic acid scaffold modification
  modified_base 18: mod_base = OTHER; note = misc_feature - bicyclic nucleic acid scaffold modification
  source 1..18: mol_type = other RNA
ccctccttccatgactca

SEQ ID NO: 5605 - RNA, 18 nt, synthetic construct
  misc_feature 1..18: note = Antisense oligonucleotide
  modified_base 1: mod_base = OTHER; note = misc_feature - bicyclic nucleic acid scaffold modification
  modified_base 13: mod_base = OTHER; note = misc_feature - bicyclic nucleic acid scaffold modification
  modified_base 17..18: mod_base = OTHER; note = misc_feature - bicyclic nucleic acid scaffold modification
  source 1..18: mol_type = other RNA
ccctccttccatgactca

SEQ ID NO: 5606 - RNA, 18 nt, synthetic construct
  misc_feature 1..18: note = Antisense oligonucleotide
  modified_base 1..2: mod_base = OTHER; note = misc_feature - bicyclic nucleic acid scaffold modification
  modified_base 17..18: mod_base = OTHER; note = misc_feature - bicyclic nucleic acid scaffold modification
  source 1..18: mol_type = other RNA
ccctccttccatgactca

SEQ ID NO: 5607 - RNA, 18 nt, synthetic construct
  misc_feature 1..18: note = Antisense oligonucleotide
  modified_base 1..2: mod_base = OTHER; note = misc_feature - bicyclic nucleic acid scaffold modification
  modified_base 13: mod_base = OTHER; note = misc_feature - bicyclic nucleic acid scaffold modification
  modified_base 17..18: mod_base = OTHER; note = misc_feature - bicyclic nucleic acid scaffold modification
  source 1..18: mol_type = other RNA
ccctccttccatgactca

SEQ ID NO: 5608 - RNA, 18 nt, synthetic construct
  misc_feature 1..18: note = Antisense oligonucleotide
  modified_base 1: mod_base = OTHER; note = misc_feature - bicyclic nucleic acid scaffold modification
  modified_base 18: mod_base = OTHER; note = misc_feature - bicyclic nucleic acid scaffold modification
  source 1..18: mol_type = other RNA
cctccttccatgactcaa

SEQ ID NO: 5609 - RNA, 18 nt, synthetic construct
  misc_feature 1..18: note = Antisense oligonucleotide
  modified_base 1: mod_base = OTHER; note = misc_feature - bicyclic nucleic acid scaffold modification
  modified_base 16: mod_base = OTHER; note = misc_feature - bicyclic nucleic acid scaffold modification
  modified_base 18: mod_base = OTHER; note = misc_feature - bicyclic nucleic acid scaffold modification
  source 1..18: mol_type = other RNA
cctccttccatgactcaa

SEQ ID NO: 5610 - RNA, 18 nt, synthetic construct
  misc_feature 1..18: note = Antisense oligonucleotide
  modified_base 1: mod_base = OTHER; note = misc_feature - bicyclic nucleic acid scaffold modification
  modified_base 14: mod_base = OTHER; note = misc_feature - bicyclic nucleic acid scaffold modification
  modified_base 18: mod_base = OTHER; note = misc_feature - bicyclic nucleic acid scaffold modification
  source 1..18: mol_type = other RNA
cctccttccatgactcaa

SEQ ID NO: 5611 - RNA, 18 nt, synthetic construct
  misc_feature 1..18: note = Antisense oligonucleotide
  modified_base 1: mod_base = OTHER; note = misc_feature - bicyclic nucleic acid scaffold modification
  modified_base 12: mod_base = OTHER; note = misc_feature - bicyclic nucleic acid scaffold modification
  modified_base 18: mod_base = OTHER; note = misc_feature - bicyclic nucleic acid scaffold modification
  source 1..18: mol_type = other RNA
cctccttccatgactcaa

SEQ ID NO: 5612 - RNA, 18 nt, synthetic construct
  misc_feature 1..18: note = Antisense oligonucleotide
  modified_base 1: mod_base = OTHER; note = misc_feature - bicyclic nucleic acid scaffold modification
  modified_base 9: mod_base = OTHER; note = misc_feature - bicyclic nucleic acid scaffold modification
  modified_base 18: mod_base = OTHER; note = misc_feature - bicyclic nucleic acid scaffold modification
  source 1..18: mol_type = other RNA
cctccttccatgactcaa

SEQ ID NO: 5613 - RNA, 18 nt, synthetic construct
  misc_feature 1..18: note = Antisense oligonucleotide
  modified_base 1: mod_base = OTHER; note = misc_feature - bicyclic nucleic acid scaffold modification
  modified_base 5: mod_base = OTHER; note = misc_feature - bicyclic nucleic acid scaffold modification
  modified_base 18: mod_base = OTHER; note = misc_feature - bicyclic nucleic acid scaffold modification
  source 1..18: mol_type = other RNA
cctccttccatgactcaa

SEQ ID NO: 5614 - RNA, 18 nt, synthetic construct
  misc_feature 1..18: note = Antisense oligonucleotide
  modified_base 1: mod_base = OTHER; note = misc_feature - bicyclic nucleic acid scaffold modification
  modified_base 5: mod_base = OTHER; note = misc_feature - bicyclic nucleic acid scaffold modification
  modified_base 14: mod_base = OTHER; note = misc_feature - bicyclic nucleic acid scaffold modification
  modified_base 18: mod_base = OTHER; note = misc_feature - bicyclic nucleic acid scaffold modification
  source 1..18: mol_type = other RNA
cctccttccatgactcaa

SEQ ID NO: 5615 - RNA, 18 nt, synthetic construct
  misc_feature 1..18: note = Antisense oligonucleotide
  modified_base 1: mod_base = OTHER; note = misc_feature - bicyclic nucleic acid scaffold modification
  modified_base 9: mod_base = OTHER; note = misc_feature - bicyclic nucleic acid scaffold modification
  modified_base 12: mod_base = OTHER; note = misc_feature - bicyclic nucleic acid scaffold modification
  modified_base 18: mod_base = OTHER; note = misc_feature - bicyclic nucleic acid scaffold modification
  source 1..18: mol_type = other RNA
cctccttccatgactcaa

SEQ ID NO: 5616 - RNA, 18 nt, synthetic construct
  misc_feature 1..18: note = Antisense oligonucleotide
  modified_base 1: mod_base = OTHER; note = misc_feature - bicyclic nucleic acid scaffold modification
  modified_base 9: mod_base = OTHER; note = misc_feature - bicyclic nucleic acid scaffold modification
  modified_base 16: mod_base = OTHER; note = misc_feature - bicyclic nucleic acid scaffold modification
  modified_base 18: mod_base = OTHER; note = misc_feature - bicyclic nucleic acid scaffold modification
  source 1..18: mol_type = other RNA
cctccttccatgactcaa

SEQ ID NO: 5617 - RNA, 18 nt, synthetic construct
  misc_feature 1..18: note = Antisense oligonucleotide
  modified_base 1: mod_base = OTHER; note = misc_feature - bicyclic nucleic acid scaffold modification
  modified_base 5: mod_base = OTHER; note = misc_feature - bicyclic nucleic acid scaffold modification
  modified_base 12: mod_base = OTHER; note = misc_feature - bicyclic nucleic acid scaffold modification
  modified_base 18: mod_base = OTHER; note = misc_feature - bicyclic nucleic acid scaffold modification
  source 1..18: mol_type = other RNA
cctccttccatgactcaa

SEQ ID NO: 5618 - RNA, 18 nt, synthetic construct
  misc_feature 1..18: note = Antisense oligonucleotide
  modified_base 1..2: mod_base = OTHER; note = misc_feature - bicyclic nucleic acid scaffold modification
  modified_base 17..18: mod_base = OTHER; note = misc_feature - bicyclic nucleic acid scaffold modification
  source 1..18: mol_type = other RNA
cctccttccatgactcaa

SEQ ID NO: 5619 - RNA, 18 nt, synthetic construct
  misc_feature 1..18: note = Antisense oligonucleotide
  modified_base 1..2: mod_base = OTHER; note = misc_feature - bicyclic nucleic acid scaffold modification
  modified_base 12: mod_base = OTHER; note = misc_feature - bicyclic nucleic acid scaffold modification
  modified_base 17..18: mod_base = OTHER; note = misc_feature - bicyclic nucleic acid scaffold modification
  source 1..18: mol_type = other RNA
cctccttccatgactcaa

SEQ ID NO: 5620 - RNA, 18 nt, synthetic construct
  misc_feature 1..18: note = Antisense oligonucleotide
  modified_base 1..2: mod_base = OTHER; note = misc_feature - bicyclic nucleic acid scaffold modification
  modified_base 16..18: mod_base = OTHER; note = misc_feature - bicyclic nucleic acid scaffold modification
  source 1..18: mol_type = other RNA
cctccttccatgactcaa

SEQ ID NO: 5621 - RNA, 18 nt, synthetic construct
  misc_feature 1..18: note = Antisense oligonucleotide
  modified_base 1..2: mod_base = OTHER; note = misc_feature - bicyclic nucleic acid scaffold modification
  modified_base 5: mod_base = OTHER; note = misc_feature - bicyclic nucleic acid scaffold modification
  modified_base 12: mod_base = OTHER; note = misc_feature - bicyclic nucleic acid scaffold modification
  modified_base 17..18: mod_base = OTHER; note = misc_feature - bicyclic nucleic acid scaffold modification
  source 1..18: mol_type = other RNA
cctccttccatgactcaa

SEQ ID NO: 5622 - RNA, 18 nt, synthetic construct
  misc_feature 1..18: note = Antisense oligonucleotide
  modified_base 1: mod_base = OTHER; note = misc_feature - bicyclic nucleic acid scaffold modification
  modified_base 18: mod_base = OTHER; note = misc_feature - bicyclic nucleic acid scaffold modification
  source 1..18: mol_type = other RNA
ctccttccatgactcaag

SEQ ID NO: 5623 - RNA, 18 nt, synthetic construct
  misc_feature 1..18: note = Antisense oligonucleotide
  modified_base 1: mod_base = OTHER; note = misc_feature - bicyclic nucleic acid scaffold modification
  modified_base 15: mod_base = OTHER; note = misc_feature - bicyclic nucleic acid scaffold modification
  modified_base 18: mod_base = OTHER; note = misc_feature - bicyclic nucleic acid scaffold modification
  source 1..18: mol_type = other RNA
ctccttccatgactcaag

SEQ ID NO: 5624 - RNA, 18 nt, synthetic construct
  misc_feature 1..18: note = Antisense oligonucleotide
  modified_base 1: mod_base = OTHER; note = misc_feature - bicyclic nucleic acid scaffold modification
  modified_base 13: mod_base = OTHER; note = misc_feature - bicyclic nucleic acid scaffold modification
  modified_base 18: mod_base = OTHER; note = misc_feature - bicyclic nucleic acid scaffold modification
  source 1..18: mol_type = other RNA
ctccttccatgactcaag

SEQ ID NO: 5625 - RNA, 18 nt, synthetic construct
  misc_feature 1..18: note = Antisense oligonucleotide
  modified_base 1: mod_base = OTHER; note = misc_feature - bicyclic nucleic acid scaffold modification
  modified_base 11: mod_base = OTHER; note = misc_feature - bicyclic nucleic acid scaffold modification
  modified_base 18: mod_base = OTHER; note = misc_feature - bicyclic nucleic acid scaffold modification
  source 1..18: mol_type = other RNA
ctccttccatgactcaag

SEQ ID NO: 5626 - RNA, 18 nt, synthetic construct
  misc_feature 1..18: note = Antisense oligonucleotide
  modified_base 1: mod_base = OTHER; note = misc_feature - bicyclic nucleic acid scaffold modification
  modified_base 8: mod_base = OTHER; note = misc_feature - bicyclic nucleic acid scaffold modification
  modified_base 18: mod_base = OTHER; note = misc_feature - bicyclic nucleic acid scaffold modification
  source 1..18: mol_type = other RNA
ctccttccatgactcaag

SEQ ID NO: 5627 - RNA, 18 nt, synthetic construct
  misc_feature 1..18: note = Antisense oligonucleotide
  modified_base 1: mod_base = OTHER; note = misc_feature - bicyclic nucleic acid scaffold modification
  modified_base 18: mod_base = OTHER; note = misc_feature - bicyclic nucleic acid scaffold modification
  source 1..18: mol_type = other RNA
ctccttccatgactcaag

SEQ ID NO: 5628 - RNA, 18 nt, synthetic construct
  misc_feature 1..18: note = Antisense oligonucleotide
  modified_base 1: mod_base = OTHER; note = misc_feature - bicyclic nucleic acid scaffold modification
  modified_base 4: mod_base = OTHER; note = misc_feature - bicyclic nucleic acid scaffold modification
  modified_base 18: mod_base = OTHER; note = misc_feature - bicyclic nucleic acid scaffold modification
  source 1..18: mol_type = other RNA
ctccttccatgactcaag

SEQ ID NO: 5629 - RNA, 18 nt, synthetic construct
  misc_feature 1..18: note = Antisense oligonucleotide
  modified_base 1: mod_base = OTHER; note = misc_feature - bicyclic nucleic acid scaffold modification
  modified_base 11: mod_base = OTHER; note = misc_feature - bicyclic nucleic acid scaffold modification
  modified_base 15: mod_base = OTHER; note = misc_feature - bicyclic nucleic acid scaffold modification
  modified_base 18: mod_base = OTHER; note = misc_feature - bicyclic nucleic acid scaffold modification
  source 1..18: mol_type = other RNA
ctccttccatgactcaag

SEQ ID NO: 5630 - RNA, 18 nt, synthetic construct
  misc_feature 1..18: note = Antisense oligonucleotide
  modified_base 1: mod_base = OTHER; note = misc_feature - bicyclic nucleic acid scaffold modification
  modified_base 8: mod_base = OTHER; note = misc_feature - bicyclic nucleic acid scaffold modification
  modified_base 13: mod_base = OTHER; note = misc_feature - bicyclic nucleic acid scaffold modification
  modified_base 18: mod_base = OTHER; note = misc_feature - bicyclic nucleic acid scaffold modification
  source 1..18: mol_type = other RNA
ctccttccatgactcaag

SEQ ID NO: 5631 - RNA, 18 nt, synthetic construct
  misc_feature 1..18: note = Antisense oligonucleotide
  modified_base 1: mod_base = OTHER; note = misc_feature - bicyclic nucleic acid scaffold modification
  modified_base 4: mod_base = OTHER; note = misc_feature - bicyclic nucleic acid scaffold modification
  modified_base 8: mod_base = OTHER; note = misc_feature - bicyclic nucleic acid scaffold modification
  modified_base 18: mod_base = OTHER; note = misc_feature - bicyclic nucleic acid scaffold modification
  source 1..18: mol_type = other RNA
ctccttccatgactcaag

SEQ ID NO: 5632 - RNA, 18 nt, synthetic construct
  misc_feature 1..18: note = Antisense oligonucleotide
  modified_base 1: mod_base = OTHER; note = misc_feature - bicyclic nucleic acid scaffold modification
  modified_base 4: mod_base = OTHER; note = misc_feature - bicyclic nucleic acid scaffold modification
  modified_base 15: mod_base = OTHER; note = misc_feature - bicyclic nucleic acid scaffold modification
  modified_base 18: mod_base = OTHER; note = misc_feature - bicyclic nucleic acid scaffold modification
  source 1..18: mol_type = other RNA
ctccttccatgactcaag

SEQ ID NO: 5633 - RNA, 18 nt, synthetic construct
  misc_feature 1..18: note = Antisense oligonucleotide
  modified_base 1: mod_base = OTHER; note = misc_feature - bicyclic nucleic acid scaffold modification
  modified_base 17..18: mod_base = OTHER; note = misc_feature - bicyclic nucleic acid scaffold modification
  source 1..18: mol_type = other RNA
ctccttccatgactcaag

SEQ ID NO: 5634 - RNA, 18 nt, synthetic construct
  modified_base 2: mod_base = OTHER; note = thymine
  misc_feature 1..18: note = Antisense oligonucleotide
  modified_base 1..2: mod_base = OTHER; note = misc_feature - bicyclic nucleic acid scaffold modification
  modified_base 17..18: mod_base = OTHER; note = misc_feature - bicyclic nucleic acid scaffold modification
  source 1..18: mol_type = other RNA
ctccttccatgactcaag

SEQ ID NO: 5635 - RNA, 18 nt, synthetic construct
  modified_base 2: mod_base = OTHER; note = thymine
  misc_feature 1..18: note = Antisense oligonucleotide
  modified_base 1..2: mod_base = OTHER; note = misc_feature - bicyclic nucleic acid scaffold modification
  modified_base 11: mod_base = OTHER; note = misc_feature - bicyclic nucleic acid scaffold modification
  modified_base 13: mod_base = OTHER; note = misc_feature - bicyclic nucleic acid scaffold modification
  modified_base 15: mod_base = OTHER; note = misc_feature - bicyclic nucleic acid scaffold modification
  modified_base 18: mod_base = OTHER; note = misc_feature - bicyclic nucleic acid scaffold modification
  source 1..18: mol_type = other RNA
ctccttccatgactcaag

SEQ ID NO: 5636 - RNA, 18 nt, synthetic construct
  modified_base 1: mod_base = OTHER; note = thymine
  misc_feature 1..18: note = Antisense oligonucleotide
  modified_base 1: mod_base = OTHER; note = misc_feature - bicyclic nucleic acid scaffold modification
  modified_base 18: mod_base = OTHER; note = misc_feature - bicyclic nucleic acid scaffold modification
  source 1..18: mol_type = other RNA
tccttccatgactcaagc

SEQ ID NO: 5637 - RNA, 18 nt, synthetic construct
  modified_base 1: mod_base = OTHER; note = thymine
  misc_feature 1..18: note = Antisense oligonucleotide
  modified_base 1: mod_base = OTHER; note = misc_feature - bicyclic nucleic acid scaffold modification
  modified_base 17..18: mod_base = OTHER; note = misc_feature - bicyclic nucleic acid scaffold modification
  source 1..18: mol_type = other RNA
tccttccatgactcaagc

SEQ ID NO: 5638 - RNA, 18 nt, synthetic construct
  modified_base 1: mod_base = OTHER; note = thymine
  misc_feature 1..18: note = Antisense oligonucleotide
  modified_base 1: mod_base = OTHER; note = misc_feature - bicyclic nucleic acid scaffold modification
  modified_base 14: mod_base = OTHER; note = misc_feature - bicyclic nucleic acid scaffold modification
  modified_base 18: mod_base = OTHER; note = misc_feature - bicyclic nucleic acid scaffold modification
  source 1..18: mol_type = other RNA
tccttccatgactcaagc

SEQ ID NO: 5639 - RNA, 18 nt, synthetic construct
  modified_base 1: mod_base = OTHER; note = thymine
  misc_feature 1..18: note = Antisense oligonucleotide
  modified_base 1: mod_base = OTHER; note = misc_feature - bicyclic nucleic acid scaffold modification
  modified_base 12: mod_base = OTHER; note = misc_feature - bicyclic nucleic acid scaffold modification
  modified_base 18: mod_base = OTHER; note = misc_feature - bicyclic nucleic acid scaffold modification
  source 1..18: mol_type = other RNA
tccttccatgactcaagc

SEQ ID NO: 5640 - RNA, 18 nt, synthetic construct
  modified_base 1: mod_base = OTHER; note = thymine
  misc_feature 1..18: note = Antisense oligonucleotide
  modified_base 1: mod_base = OTHER; note = misc_feature - bicyclic nucleic acid scaffold modification
  modified_base 10: mod_base = OTHER; note = misc_feature - bicyclic nucleic acid scaffold modification
  modified_base 18: mod_base = OTHER; note = misc_feature - bicyclic nucleic acid scaffold modification
  source 1..18: mol_type = other RNA
tccttccatgactcaagc

SEQ ID NO: 5641 - RNA, 18 nt, synthetic construct
  modified_base 1: mod_base = OTHER; note = thymine
  misc_feature 1..18: note = Antisense oligonucleotide
  modified_base 1: mod_base = OTHER; note = misc_feature - bicyclic nucleic acid scaffold modification
  modified_base 7: mod_base = OTHER; note = misc_feature - bicyclic nucleic acid scaffold modification
  modified_base 18: mod_base = OTHER; note = misc_feature - bicyclic nucleic acid scaffold modification
  source 1..18: mol_type = other RNA
tccttccatgactcaagc

SEQ ID NO: 5642 - RNA, 18 nt, synthetic construct
  modified_base 1: mod_base = OTHER; note = thymine
  misc_feature 1..18: note = Antisense oligonucleotide
  modified_base 1: mod_base = OTHER; note = misc_feature - bicyclic nucleic acid scaffold modification
  modified_base 3: mod_base = OTHER; note = misc_feature - bicyclic nucleic acid scaffold modification
  modified_base 18: mod_base = OTHER; note = misc_feature - bicyclic nucleic acid scaffold modification
  source 1..18: mol_type = other RNA
tccttccatgactcaagc

SEQ ID NO: 5643 - RNA, 18 nt, synthetic construct
  modified_base 1: mod_base = OTHER; note = thymine
  misc_feature 1..18: note = Antisense oligonucleotide
  modified_base 1: mod_base = OTHER; note = misc_feature - bicyclic nucleic acid scaffold modification
  modified_base 10: mod_base = OTHER; note = misc_feature - bicyclic nucleic acid scaffold modification
  modified_base 17..18: mod_base = OTHER; note = misc_feature - bicyclic nucleic acid scaffold modification
  source 1..18: mol_type = other RNA
tccttccatgactcaagc

SEQ ID NO: 5644 - RNA, 18 nt, synthetic construct
  modified_base 1: mod_base = OTHER; note = thymine
  misc_feature 1..18: note = Antisense oligonucleotide
  modified_base 1: mod_base = OTHER; note = misc_feature - bicyclic nucleic acid scaffold modification
  modified_base 7: mod_base = OTHER; note = misc_feature - bicyclic nucleic acid scaffold modification
  modified_base 14: mod_base = OTHER; note = misc_feature - bicyclic nucleic acid scaffold modification
  modified_base 18: mod_base = OTHER; note = misc_feature - bicyclic nucleic acid scaffold modification
  source 1..18: mol_type = other RNA
tccttccatgactcaagc

SEQ ID NO: 5645 - RNA, 18 nt, synthetic construct
  modified_base 1: mod_base = OTHER; note = thymine
  misc_feature 1..18: note = Antisense oligonucleotide
  modified_base 1: mod_base = OTHER; note = misc_feature - bicyclic nucleic acid scaffold modification
  modified_base 3: mod_base = OTHER; note = misc_feature - bicyclic nucleic acid scaffold modification
  modified_base 12: mod_base = OTHER; note = misc_feature - bicyclic nucleic acid scaffold modification
  modified_base 18: mod_base = OTHER; note = misc_feature - bicyclic nucleic acid scaffold modification
  source 1..18: mol_type = other RNA
tccttccatgactcaagc

SEQ ID NO: 5646 - RNA, 18 nt, synthetic construct
  modified_base 1: mod_base = OTHER; note = thymine
  misc_feature 1..18: note = Antisense oligonucleotide
  modified_base 1: mod_base = OTHER; note = misc_feature - bicyclic nucleic acid scaffold modification
  modified_base 17..18: mod_base = OTHER; note = misc_feature - bicyclic nucleic acid scaffold modification
  source 1..18: mol_type = other RNA
tccttccatgactcaagc

SEQ ID NO: 5647 - RNA, 18 nt, synthetic construct
  modified_base 1: mod_base = OTHER; note = thymine
  misc_feature 1..18: note = Antisense oligonucleotide
  modified_base 1..2: mod_base = OTHER; note = misc_feature - bicyclic nucleic acid scaffold modification
  modified_base 17..18: mod_base = OTHER; note = misc_feature - bicyclic nucleic acid scaffold modification
  source 1..18: mol_type = other RNA
tccttccatgactcaagc

SEQ ID NO: 5648 - RNA, 18 nt, synthetic construct
  modified_base 1: mod_base = OTHER; note = thymine
  misc_feature 1..18: note = Antisense oligonucleotide
  modified_base 1..2: mod_base = OTHER; note = misc_feature - bicyclic nucleic acid scaffold modification
  modified_base 10: mod_base = OTHER; note = misc_feature - bicyclic nucleic acid scaffold modification
  modified_base 17..18: mod_base = OTHER; note = misc_feature - bicyclic nucleic acid scaffold modification
  source 1..18: mol_type = other RNA
tccttccatgactcaagc

SEQ ID NO: 5649 - RNA, 18 nt, synthetic construct
  modified_base 18: mod_base = OTHER; note = thymine
  misc_feature 1..18: note = Antisense oligonucleotide
  modified_base 1: mod_base = OTHER; note = misc_feature - bicyclic nucleic acid scaffold modification
  modified_base 18: mod_base = OTHER; note = misc_feature - bicyclic nucleic acid scaffold modification
  source 1..18: mol_type = other RNA
ccttccatgactcaagct

SEQ ID NO: 5650 - RNA, 18 nt, synthetic construct
  modified_base 18: mod_base = OTHER; note = thymine
  misc_feature 1..18: note = Antisense oligonucleotide
  modified_base 1: mod_base = OTHER; note = misc_feature - bicyclic nucleic acid scaffold modification
  modified_base 16: mod_base = OTHER; note = misc_feature - bicyclic nucleic acid scaffold modification
  modified_base 18: mod_base = OTHER; note = misc_feature - bicyclic nucleic acid scaffold modification
  source 1..18: mol_type = other RNA
ccttccatgactcaagct

SEQ ID NO: 5651 - RNA, 18 nt, synthetic construct
  modified_base 18: mod_base = OTHER; note = thymine
  misc_feature 1..18: note = Antisense oligonucleotide
  modified_base 1: mod_base = OTHER; note = misc_feature - bicyclic nucleic acid scaffold modification
  modified_base 13: mod_base = OTHER; note = misc_feature - bicyclic nucleic acid scaffold modification
  modified_base 18: mod_base = OTHER; note = misc_feature - bicyclic nucleic acid scaffold modification
  source 1..18: mol_type = other RNA
ccttccatgactcaagct

SEQ ID NO: 5652 - RNA, 18 nt, synthetic construct
  modified_base 18: mod_base = OTHER; note = thymine
  misc_feature 1..18: note = Antisense oligonucleotide
  modified_base 1: mod_base = OTHER; note = misc_feature - bicyclic nucleic acid scaffold modification
  modified_base 11: mod_base = OTHER; note = misc_feature - bicyclic nucleic acid scaffold modification
  modified_base 18: mod_base = OTHER; note = misc_feature - bicyclic nucleic acid scaffold modification
  source 1..18: mol_type = other RNA
ccttccatgactcaagct

SEQ ID NO: 5653 - RNA, 18 nt, synthetic construct
  modified_base 18: mod_base = OTHER; note = thymine
  misc_feature 1..18: note = Antisense oligonucleotide
  modified_base 1: mod_base = OTHER; note = misc_feature - bicyclic nucleic acid scaffold modification
  modified_base 9: mod_base = OTHER; note = misc_feature - bicyclic nucleic acid scaffold modification
  modified_base 18: mod_base = OTHER; note = misc_feature - bicyclic nucleic acid scaffold modification
  source 1..18: mol_type = other RNA
ccttccatgactcaagct

SEQ ID NO: 5654 - RNA, 18 nt, synthetic construct
  modified_base 18: mod_base = OTHER; note = thymine
  misc_feature 1..18: note = Antisense oligonucleotide
  modified_base 1: mod_base = OTHER; note = misc_feature - bicyclic nucleic acid scaffold modification
  modified_base 6: mod_base = OTHER; note = misc_feature - bicyclic nucleic acid scaffold modification
  modified_base 18: mod_base = OTHER; note = misc_feature - bicyclic nucleic acid scaffold modification
  source 1..18: mol_type = other RNA
ccttccatgactcaagct

SEQ ID NO: 5655 - RNA, 18 nt, synthetic construct
  modified_base 18: mod_base = OTHER; note = thymine
  misc_feature 1..18: note = Antisense oligonucleotide
  modified_base 1: mod_base = OTHER; note = misc_feature - bicyclic nucleic acid scaffold modification
  modified_base 9: mod_base = OTHER; note = misc_feature - bicyclic nucleic acid scaffold modification
  modified_base 16: mod_base = OTHER; note = misc_feature - bicyclic nucleic acid scaffold modification
  modified_base 18: mod_base = OTHER; note = misc_feature - bicyclic nucleic acid scaffold modification
  source 1..18: mol_type = other RNA
ccttccatgactcaagct

SEQ ID NO: 5656 - RNA, 18 nt, synthetic construct
  modified_base 18: mod_base = OTHER; note = thymine
  misc_feature 1..18: note = Antisense oligonucleotide
  modified_base 1: mod_base = OTHER; note = misc_feature - bicyclic nucleic acid scaffold modification
  modified_base 6: mod_base = OTHER; note = misc_feature - bicyclic nucleic acid scaffold modification
  modified_base 13: mod_base = OTHER; note = misc_feature - bicyclic nucleic acid scaffold modification
  modified_base 18: mod_base = OTHER; note = misc_feature - bicyclic nucleic acid scaffold modification
  source 1..18: mol_type = other RNA
ccttccatgactcaagct

SEQ ID NO: 5657 - RNA, 18 nt, synthetic construct
  modified_base 18: mod_base = OTHER; note = thymine
  misc_feature 1..18: note = Antisense oligonucleotide
  modified_base 1..2: mod_base = OTHER; note = misc_feature - bicyclic nucleic acid scaffold modification
  modified_base 11: mod_base = OTHER; note = misc_feature - bicyclic nucleic acid scaffold modification
  modified_base 18: mod_base = OTHER; note = misc_feature - bicyclic nucleic acid scaffold modification
  source 1..18: mol_type = other RNA
ccttccatgactcaagct

SEQ ID NO: 5658 - RNA, 18 nt, synthetic construct
  modified_base 18: mod_base = OTHER; note = thymine
  misc_feature 1..18: note = Antisense oligonucleotide
  modified_base 1: mod_base = OTHER; note = misc_feature - bicyclic nucleic acid scaffold modification
  modified_base 17..18: mod_base = OTHER; note = misc_feature - bicyclic nucleic acid scaffold modification
  source 1..18: mol_type = other RNA
ccttccatgactcaagct

SEQ ID NO: 5659 - RNA, 18 nt, synthetic construct
  modified_base 18: mod_base = OTHER; note = thymine
  misc_feature 1..18: note = Antisense oligonucleotide
  modified_base 1..2: mod_base = OTHER; note = misc_feature - bicyclic nucleic acid scaffold modification
  modified_base 17..18: mod_base = OTHER; note = misc_feature - bicyclic nucleic acid scaffold modification
  source 1..18: mol_type = other RNA
ccttccatgactcaagct

SEQ ID NO: 5660 - RNA, 18 nt, synthetic construct
  modified_base 18: mod_base = OTHER; note = thymine
  misc_feature 1..18: note = Antisense oligonucleotide
  modified_base 1..2: mod_base = OTHER; note = misc_feature - bicyclic nucleic acid scaffold modification
  modified_base 9: mod_base = OTHER; note = misc_feature - bicyclic nucleic acid scaffold modification
  modified_base 17..18: mod_base = OTHER; note = misc_feature - bicyclic nucleic acid scaffold modification
  source 1..18: mol_type = other RNA
ccttccatgactcaagct

SEQ ID NO: 5661 - RNA, 18 nt, synthetic construct
  modified_base 18: mod_base = OTHER; note = thymine
  misc_feature 1..18: note = Antisense oligonucleotide
  modified_base 1: mod_base = OTHER; note = misc_feature - bicyclic nucleic acid scaffold modification
  modified_base 9: mod_base = OTHER; note = misc_feature - bicyclic nucleic acid scaffold modification
  modified_base 16..18: mod_base = OTHER; note = misc_feature - bicyclic nucleic acid scaffold modification
  source 1..18: mol_type = other RNA
ccttccatgactcaagct

SEQ ID NO: 5662 - RNA, 16 nt, synthetic construct
  misc_feature 1..16: note = Antisense oligonucleotide
  modified_base 1: mod_base = OTHER; note = misc_feature - bicyclic nucleic acid scaffold modification
  modified_base 16: mod_base = OTHER; note = misc_feature - bicyclic nucleic acid scaffold modification
  source 1..16: mol_type = other RNA
gaccctccttccatga

SEQ ID NO: 5663 - RNA, 16 nt, synthetic construct
  misc_feature 1..16: note = Antisense oligonucleotide
  modified_base 1: mod_base = OTHER; note = misc_feature - bicyclic nucleic acid scaffold modification
  modified_base 15..16: mod_base = OTHER; note = misc_feature - bicyclic nucleic acid scaffold modification
  source 1..16: mol_type = other RNA
gaccctccttccatga

SEQ ID NO: 5664 - RNA, 16 nt, synthetic construct
  misc_feature 1..16: note = Antisense oligonucleotide
  modified_base 1: mod_base = OTHER; note = misc_feature - bicyclic nucleic acid scaffold modification
  modified_base 12: mod_base = OTHER; note = misc_feature - bicyclic nucleic acid scaffold modification
  modified_base 16: mod_base = OTHER; note = misc_feature - bicyclic nucleic acid scaffold modification
  source 1..16: mol_type = other RNA
gaccctccttccatga

SEQ ID NO: 5665 - RNA, 16 nt, synthetic construct
  misc_feature 1..16: note = Antisense oligonucleotide
  modified_base 1: mod_base = OTHER; note = misc_feature - bicyclic nucleic acid scaffold modification
  modified_base 8: mod_base = OTHER; note = misc_feature - bicyclic nucleic acid scaffold modification
  modified_base 16: mod_base = OTHER; note = misc_feature - bicyclic nucleic acid scaffold modification
  source 1..16: mol_type = other RNA
gaccctccttccatga

SEQ ID NO: 5666 - RNA, 16 nt, synthetic construct
  misc_feature 1..16: note = Antisense oligonucleotide
  modified_base 1: mod_base = OTHER; note = misc_feature - bicyclic nucleic acid scaffold modification
  modified_base 5: mod_base = OTHER; note = misc_feature - bicyclic nucleic acid scaffold modification
  modified_base 16: mod_base = OTHER; note = misc_feature - bicyclic nucleic acid scaffold modification
  source 1..16: mol_type = other RNA
gaccctccttccatga

SEQ ID NO: 5667 - RNA, 16 nt, synthetic construct
  misc_feature 1..16: note = Antisense oligonucleotide
  modified_base 1: mod_base = OTHER; note = misc_feature - bicyclic nucleic acid scaffold modification
  modified_base 8: mod_base = OTHER; note = misc_feature - bicyclic nucleic acid scaffold modification
  modified_base 15..16: mod_base = OTHER; note = misc_feature - bicyclic nucleic acid scaffold modification
  source 1..16: mol_type = other RNA
gaccctccttccatga

SEQ ID NO: 5668 - RNA, 16 nt, synthetic construct
  misc_feature 1..16: note = Antisense oligonucleotide
  modified_base 1: mod_base = OTHER; note = misc_feature - bicyclic nucleic acid scaffold modification
  modified_base 5: mod_base = OTHER; note = misc_feature - bicyclic nucleic acid scaffold modification
  modified_base 12: mod_base = OTHER; note = misc_feature - bicyclic nucleic acid scaffold modification
  modified_base 16: mod_base = OTHER; note = misc_feature - bicyclic nucleic acid scaffold modification
  source 1..16: mol_type = other RNA
gaccctccttccatga

SEQ ID NO: 5669 - RNA, 16 nt, synthetic construct
  misc_feature 1..16: note = Antisense oligonucleotide
  modified_base 1..2: mod_base = OTHER; note = misc_feature - bicyclic nucleic acid scaffold modification
  modified_base 15..16: mod_base = OTHER; note = misc_feature - bicyclic nucleic acid scaffold modification
  source 1..16: mol_type = other RNA
gaccctccttccatga

SEQ ID NO: 5670 - RNA, 16 nt, synthetic construct
  misc_feature 1..16: note = Antisense oligonucleotide
  modified_base 1: mod_base = OTHER; note = misc_feature - bicyclic nucleic acid scaffold modification
  modified_base 5: mod_base = OTHER; note = misc_feature - bicyclic nucleic acid scaffold modification
  modified_base 12: mod_base = OTHER; note = misc_feature - bicyclic nucleic acid scaffold modification
  modified_base 15..16: mod_base = OTHER; note = misc_feature - bicyclic nucleic acid scaffold modification
  source 1..16: mol_type = other RNA
gaccctccttccatga

SEQ ID NO: 5671 - RNA, 16 nt, synthetic construct
  misc_feature 1..16: note = Antisense oligonucleotide
  modified_base 1..2: mod_base = OTHER; note = misc_feature - bicyclic nucleic acid scaffold modification
  modified_base 16: mod_base = OTHER; note = misc_feature - bicyclic nucleic acid scaffold modification
  source 1..16: mol_type = other RNA
gaccctccttccatga

SEQ ID NO: 5672 - RNA, 16 nt, synthetic construct
  modified_base 14: mod_base = OTHER; note = thymine
  misc_feature 1..16: note = Antisense oligonucleotide
  modified_base 1: mod_base = OTHER; note = misc_feature - bicyclic nucleic acid scaffold modification
  modified_base 14..16: mod_base = OTHER; note = misc_feature - bicyclic nucleic acid scaffold modification
  source 1..16: mol_type = other RNA
gaccctccttccatga

SEQ ID NO: 5673 - RNA, 16 nt, synthetic construct
  misc_feature 1..16: note = Antisense oligonucleotide
  modified_base 1: mod_base = OTHER; note = misc_feature - bicyclic nucleic acid scaffold modification
  modified_base 16: mod_base = OTHER; note = misc_feature - bicyclic nucleic acid scaffold modification
  source 1..16: mol_type = other RNA
accctccttccatgac

SEQ ID NO: 5674 - RNA, 16 nt, synthetic construct
  misc_feature 1..16: note = Antisense oligonucleotide
  modified_base 1: mod_base = OTHER; note = misc_feature - bicyclic nucleic acid scaffold modification
  modified_base 14: mod_base = OTHER; note = misc_feature - bicyclic nucleic acid scaffold modification
  modified_base 16: mod_base = OTHER; note = misc_feature - bicyclic nucleic acid scaffold modification
  source 1..16: mol_type = other RNA
accctccttccatgac

SEQ ID NO: 5675 - RNA, 16 nt, synthetic construct
  misc_feature 1..16: note = Antisense oligonucleotide
  modified_base 1: mod_base = OTHER; note = misc_feature - bicyclic nucleic acid scaffold modification
  modified_base 11: mod_base = OTHER; note = misc_feature - bicyclic nucleic acid scaffold modification
  modified_base 16: mod_base = OTHER; note = misc_feature - bicyclic nucleic acid scaffold modification
  source 1..16: mol_type = other RNA
accctccttccatgac

SEQ ID NO: 5676 - RNA, 16 nt, synthetic construct
  misc_feature 1..16: note = Antisense oligonucleotide
  modified_base 1: mod_base = OTHER; note = misc_feature - bicyclic nucleic acid scaffold modification
  modified_base 7: mod_base = OTHER; note = misc_feature - bicyclic nucleic acid scaffold modification
  modified_base 16: mod_base = OTHER; note = misc_feature - bicyclic nucleic acid scaffold modification
  source 1..16: mol_type = other RNA
accctccttccatgac

SEQ ID NO: 5677 - RNA, 16 nt, synthetic construct
  misc_feature 1..16: note = Antisense oligonucleotide
  modified_base 1: mod_base = OTHER; note = misc_feature - bicyclic nucleic acid scaffold modification
  modified_base 4: mod_base = OTHER; note = misc_feature - bicyclic nucleic acid scaffold modification
  modified_base 16: mod_base = OTHER; note = misc_feature - bicyclic nucleic acid scaffold modification
  source 1..16: mol_type = other RNA
accctccttccatgac

SEQ ID NO: 5678 - RNA, 16 nt, synthetic construct
  misc_feature 1..16: note = Antisense oligonucleotide
  modified_base 1: mod_base = OTHER; note = misc_feature - bicyclic nucleic acid scaffold modification
  modified_base 4: mod_base = OTHER; note = misc_feature - bicyclic nucleic acid scaffold modification
  modified_base 10: mod_base = OTHER; note = misc_feature - bicyclic nucleic acid scaffold modification
  modified_base 16: mod_base = OTHER; note = misc_feature - bicyclic nucleic acid scaffold modification
  source 1..16: mol_type = other RNA
accctccttccatgac

SEQ ID NO: 5679 - RNA, 16 nt, synthetic construct
  misc_feature 1..16: note = Antisense oligonucleotide
  modified_base 1: mod_base = OTHER; note = misc_feature - bicyclic nucleic acid scaffold modification
  modified_base 7: mod_base = OTHER; note = misc_feature - bicyclic nucleic acid scaffold modification
  modified_base 14: mod_base = OTHER; note = misc_feature - bicyclic nucleic acid scaffold modification
  modified_base 16: mod_base = OTHER; note = misc_feature - bicyclic nucleic acid scaffold modification
  source 1..16: mol_type = other RNA
accctccttccatgac

SEQ ID NO: 5680 - RNA, 16 nt, synthetic construct
  misc_feature 1..16: note = Antisense oligonucleotide
  modified_base 1: mod_base = OTHER; note = misc_feature - bicyclic nucleic acid scaffold modification
  modified_base 4: mod_base = OTHER; note = misc_feature - bicyclic nucleic acid scaffold modification
  modified_base 11: mod_base = OTHER; note = misc_feature - bicyclic nucleic acid scaffold modification
  modified_base 16: mod_base = OTHER; note = misc_feature - bicyclic nucleic acid scaffold modification
  source 1..16: mol_type = other RNA
accctccttccatgac

SEQ ID NO: 5681 - RNA, 16 nt, synthetic construct
  misc_feature 1..16: note = Antisense oligonucleotide
  modified_base 1: mod_base = OTHER; note = misc_feature - bicyclic nucleic acid scaffold modification
  modified_base 15..16: mod_base = OTHER; note = misc_feature - bicyclic nucleic acid scaffold modification
  source 1..16: mol_type = other RNA
accctccttccatgac

SEQ ID NO: 5682 - RNA, 16 nt, synthetic construct
  misc_feature 1..16: note = Antisense oligonucleotide
  modified_base 1..2: mod_base = OTHER; note = misc_feature - bicyclic nucleic acid scaffold modification
  modified_base 15..16: mod_base = OTHER; note = misc_feature - bicyclic nucleic acid scaffold modification
  source 1..16: mol_type = other RNA
accctccttccatgac

SEQ ID NO: 5683 - RNA, 16 nt, synthetic construct
  misc_feature 1..16: note = Antisense oligonucleotide
  modified_base 1: mod_base = OTHER; note = misc_feature - bicyclic nucleic acid scaffold modification
  modified_base 7: mod_base = OTHER; note = misc_feature - bicyclic nucleic acid scaffold modification
  modified_base 14..16: mod_base = OTHER; note = misc_feature - bicyclic nucleic acid scaffold modification
  source 1..16: mol_type = other RNA
accctccttccatgac

SEQ ID NO: 5684 - RNA, 16 nt, synthetic construct
  modified_base 16: mod_base = OTHER; note = thymine
  misc_feature 1..16: note = Antisense oligonucleotide
  modified_base 1: mod_base = OTHER; note = misc_feature - bicyclic nucleic acid scaffold modification
  modified_base 16: mod_base = OTHER; note = misc_feature - bicyclic nucleic acid scaffold modification
  source 1..16: mol_type = other RNA
ccctccttccatgact

SEQ ID NO: 5685 - RNA, 16 nt, synthetic construct
  modified_base 16: mod_base = OTHER; note = thymine
  misc_feature 1..16: note = Antisense oligonucleotide
  modified_base 1: mod_base = OTHER; note = misc_feature - bicyclic nucleic acid scaffold modification
  modified_base 15..16: mod_base = OTHER; note = misc_feature - bicyclic nucleic acid scaffold modification
  source 1..16: mol_type = other RNA
ccctccttccatgact

SEQ ID NO: 5686 - RNA, 16 nt, synthetic construct
  modified_base 16: mod_base = OTHER; note = thymine
  misc_feature 1..16: note = Antisense oligonucleotide
  modified_base 1: mod_base = OTHER; note = misc_feature - bicyclic nucleic acid scaffold modification
  modified_base 13: mod_base = OTHER; note = misc_feature - bicyclic nucleic acid scaffold modification
  modified_base 16: mod_base = OTHER; note = misc_feature - bicyclic nucleic acid scaffold modification
  source 1..16: mol_type = other RNA
ccctccttccatgact

SEQ ID NO: 5687 - RNA, 16 nt, synthetic construct
  modified_base 16: mod_base = OTHER; note = thymine
  misc_feature 1..16: note = Antisense oligonucleotide
  modified_base 1: mod_base = OTHER; note = misc_feature - bicyclic nucleic acid scaffold modification
  modified_base 10: mod_base = OTHER; note = misc_feature - bicyclic nucleic acid scaffold modification
  modified_base 16: mod_base = OTHER; note = misc_feature - bicyclic nucleic acid scaffold modification
  source 1..16: mol_type = other RNA
ccctccttccatgact

SEQ ID NO: 5688 - RNA, 16 nt, synthetic construct
  modified_base 16: mod_base = OTHER; note = thymine
  misc_feature 1..16: note = Antisense oligonucleotide
  modified_base 1: mod_base = OTHER; note = misc_feature - bicyclic nucleic acid scaffold modification
  modified_base 6: mod_base = OTHER; note = misc_feature - bicyclic nucleic acid scaffold modification
  modified_base 16: mod_base = OTHER; note = misc_feature - bicyclic nucleic acid scaffold modification
  source 1..16: mol_type = other RNA
ccctccttccatgact

SEQ ID NO: 5689 - RNA, 16 nt, synthetic construct
  modified_base 16: mod_base = OTHER; note = thymine
  misc_feature 1..16: note = Antisense oligonucleotide
  modified_base 1: mod_base = OTHER; note = misc_feature - bicyclic nucleic acid scaffold modification
  modified_base 3: mod_base = OTHER; note = misc_feature - bicyclic nucleic acid scaffold modification
  modified_base 16: mod_base = OTHER; note = misc_feature - bicyclic nucleic acid scaffold modification
  source 1..16: mol_type = other RNA
ccctccttccatgact

SEQ ID NO: 5690 - RNA, 16 nt, synthetic construct
  modified_base 16: mod_base = OTHER; note = thymine
  misc_feature 1..16: note = Antisense oligonucleotide
  modified_base 1: mod_base = OTHER; note = misc_feature - bicyclic nucleic acid scaffold modification
  modified_base 13: mod_base = OTHER; note = misc_feature - bicyclic nucleic acid scaffold modification
  modified_base 15..16: mod_base = OTHER; note = misc_feature - bicyclic nucleic acid scaffold modification
  source 1..16: mol_type = other RNA
ccctccttccatgact

SEQ ID NO: 5691 - RNA, 16 nt, synthetic construct
  modified_base 16: mod_base = OTHER; note = thymine
  misc_feature 1..16: note = Antisense oligonucleotide
  modified_base 1: mod_base = OTHER; note = misc_feature - bicyclic nucleic acid scaffold modification
  modified_base 6: mod_base = OTHER; note = misc_feature - bicyclic nucleic acid scaffold modification
  modified_base 13: mod_base = OTHER; note = misc_feature - bicyclic nucleic acid scaffold modification
  modified_base 16: mod_base = OTHER; note = misc_feature - bicyclic nucleic acid scaffold modification
  source 1..16: mol_type = other RNA
ccctccttccatgact

SEQ ID NO: 5692 - RNA, 16 nt, synthetic construct
  modified_base 16: mod_base = OTHER; note = thymine
  misc_feature 1..16: note = Antisense oligonucleotide
  modified_base 1: mod_base = OTHER; note = misc_feature - bicyclic nucleic acid scaffold modification
  modified_base 6: mod_base = OTHER; note = misc_feature - bicyclic nucleic acid scaffold modification
  modified_base 10: mod_base = OTHER; note = misc_feature - bicyclic nucleic acid scaffold modification
  modified_base 16: mod_base = OTHER; note = misc_feature - bicyclic nucleic acid scaffold modification
  source 1..16: mol_type = other RNA
ccctccttccatgact

SEQ ID NO: 5693 - RNA, 16 nt, synthetic construct
  modified_base 16: mod_base = OTHER; note = thymine
  misc_feature 1..16: note = Antisense oligonucleotide
  modified_base 1..2: mod_base = OTHER; note = misc_feature - bicyclic nucleic acid scaffold modification
  modified_base 15..16: mod_base = OTHER; note = misc_feature - bicyclic nucleic acid scaffold modification
  source 1..16: mol_type = other RNA
ccctccttccatgact

SEQ ID NO: 5694 - RNA, 16 nt, synthetic construct
  modified_base 16: mod_base = OTHER; note = thymine
  misc_feature 1..16: note = Antisense oligonucleotide
  modified_base 1: mod_base = OTHER; note = misc_feature - bicyclic nucleic acid scaffold modification
  modified_base 6: mod_base = OTHER; note = misc_feature - bicyclic nucleic acid scaffold modification
  modified_base 13: mod_base = OTHER; note = misc_feature - bicyclic nucleic acid scaffold modification
  modified_base 15..16: mod_base = OTHER; note = misc_feature - bicyclic nucleic acid scaffold modification
  source 1..16: mol_type = other RNA
ccctccttccatgact

SEQ ID NO: 5695 - RNA, 16 nt, synthetic construct
  misc_feature 1..16: note = Antisense oligonucleotide
  modified_base 1: mod_base = OTHER; note = misc_feature - bicyclic nucleic acid scaffold modification
  modified_base 16: mod_base = OTHER; note = misc_feature - bicyclic nucleic acid scaffold modification
  source 1..16: mol_type = other RNA
cctccttccatgactc

SEQ ID NO: 5696 - RNA, 16 nt, synthetic construct
  misc_feature 1..16: note = Antisense oligonucleotide
  modified_base 1: mod_base = OTHER; note = misc_feature - bicyclic nucleic acid scaffold modification
  modified_base 14: mod_base = OTHER; note = misc_feature - bicyclic nucleic acid scaffold modification
  modified_base 16: mod_base = OTHER; note = misc_feature - bicyclic nucleic acid scaffold modification
  source 1..16: mol_type = other RNA
cctccttccatgactc

SEQ ID NO: 5697 - RNA, 16 nt, synthetic construct
  misc_feature 1..16: note = Antisense oligonucleotide
  modified_base 1: mod_base = OTHER; note = misc_feature - bicyclic nucleic acid scaffold modification
  modified_base 12: mod_base = OTHER; note = misc_feature - bicyclic nucleic acid scaffold modification
  modified_base 16: mod_base = OTHER; note = misc_feature - bicyclic nucleic acid scaffold modification
  source 1..16: mol_type = other RNA
cctccttccatgactc

SEQ ID NO: 5698 - RNA, 16 nt, synthetic construct
  misc_feature 1..16: note = Antisense oligonucleotide
  modified_base 1: mod_base = OTHER; note = misc_feature - bicyclic nucleic acid scaffold modification
  modified_base 9: mod_base = OTHER; note = misc_feature - bicyclic nucleic acid scaffold modification
  modified_base 16: mod_base = OTHER; note = misc_feature - bicyclic nucleic acid scaffold modification
  source 1..16: mol_type = other RNA
cctccttccatgactc

SEQ ID NO: 5699 - RNA, 16 nt, synthetic construct
  misc_feature 1..16: note = Antisense oligonucleotide
  modified_base 1: mod_base = OTHER; note = misc_feature - bicyclic nucleic acid scaffold modification
  modified_base 5: mod_base = OTHER; note = misc_feature - bicyclic nucleic acid scaffold modification
  modified_base 16: mod_base = OTHER; note = misc_feature - bicyclic nucleic acid scaffold modification
  source 1..16: mol_type = other RNA
cctccttccatgactc

SEQ ID NO: 5700 - RNA, 16 nt, synthetic construct
  misc_feature 1..16: note = Antisense oligonucleotide
  modified_base 1..2: mod_base = OTHER; note = misc_feature - bicyclic nucleic acid scaffold modification
  modified_base 16: mod_base = OTHER; note = misc_feature - bicyclic nucleic acid scaffold modification
  source 1..16: mol_type = other RNA
cctccttccatgactc

SEQ ID NO: 5701 - RNA, 16 nt, synthetic construct
  misc_feature 1..16: note = Antisense oligonucleotide
  modified_base 1: mod_base = OTHER; note = misc_feature - bicyclic nucleic acid scaffold modification
  modified_base 9: mod_base = OTHER; note = misc_feature - bicyclic nucleic acid scaffold modification
  modified_base 14: mod_base = OTHER; note = misc_feature - bicyclic nucleic acid scaffold modification
  modified_base 16: mod_base = OTHER; note = misc_feature - bicyclic nucleic acid scaffold modification
  source 1..16: mol_type = other RNA
cctccttccatgactc

SEQ ID NO: 5702 - RNA, 16 nt, synthetic construct
  misc_feature 1..16: note = Antisense oligonucleotide
  modified_base 1: mod_base = OTHER; note = misc_feature - bicyclic nucleic acid scaffold modification
  modified_base 5: mod_base = OTHER; note = misc_feature - bicyclic nucleic acid scaffold modification
  modified_base 12: mod_base = OTHER; note = misc_feature - bicyclic nucleic acid scaffold modification
  modified_base 16: mod_base = OTHER; note = misc_feature - bicyclic nucleic acid scaffold modification
  source 1..16: mol_type = other RNA
cctccttccatgactc

SEQ ID NO: 5703 - RNA, 16 nt, synthetic construct
  misc_feature 1..16: note = Antisense oligonucleotide
  modified_base 1: mod_base = OTHER; note = misc_feature - bicyclic nucleic acid scaffold modification
  modified_base 8: mod_base = OTHER; note = misc_feature - bicyclic nucleic acid scaffold modification
  modified_base 14: mod_base = OTHER; note = misc_feature - bicyclic nucleic acid scaffold modification
  modified_base 16: mod_base = OTHER; note = misc_feature - bicyclic nucleic acid scaffold modification
  source 1..16: mol_type = other RNA
cctccttccatgactc

SEQ ID NO: 5704 - RNA, 16 nt, synthetic construct
  misc_feature 1..16: note = Antisense oligonucleotide
  modified_base 1: mod_base = OTHER; note = misc_feature - bicyclic nucleic acid scaffold modification
  modified_base 4: mod_base = OTHER; note = misc_feature - bicyclic nucleic acid scaffold modification
  modified_base 12: mod_base = OTHER; note = misc_feature - bicyclic nucleic acid scaffold modification
  modified_base 16: mod_base = OTHER; note = misc_feature - bicyclic nucleic acid scaffold modification
  source 1..16: mol_type = other RNA
cctccttccatgactc

SEQ ID NO: 5705 - RNA, 16 nt, synthetic construct
  modified_base 15: mod_base = OTHER; note = thymine
  misc_feature 1..16: note = Antisense oligonucleotide
  modified_base 1: mod_base = OTHER; note = misc_feature - bicyclic nucleic acid scaffold modification
  modified_base 15..16: mod_base = OTHER; note = misc_feature - bicyclic nucleic acid scaffold modification
  source 1..16: mol_type = other RNA
cctccttccatgactc

SEQ ID NO: 5706 - RNA, 16 nt, synthetic construct
  modified_base 15: mod_base = OTHER; note = thymine
  misc_feature 1..16: note = Antisense oligonucleotide
  modified_base 1..2: mod_base = OTHER; note = misc_feature - bicyclic nucleic acid scaffold modification
  modified_base 15..16: mod_base = OTHER; note = misc_feature - bicyclic nucleic acid scaffold modification
  source 1..16: mol_type = other RNA
cctccttccatgactc

SEQ ID NO: 5707 - RNA, 16 nt, synthetic construct
  modified_base 15: mod_base = OTHER; note = thymine
  misc_feature 1..16: note = Antisense oligonucleotide
  modified_base 1..2: mod_base = OTHER; note = misc_feature - bicyclic nucleic acid scaffold modification
  modified_base 8..9: mod_base = OTHER; note = misc_feature - bicyclic nucleic acid scaffold modification
  modified_base 15..16: mod_base = OTHER; note = misc_feature - bicyclic nucleic acid scaffold modification
  source 1..16: mol_type = other RNA
cctccttccatgactc

SEQ ID NO: 5708 - RNA, 16 nt, synthetic construct
  modified_base 15: mod_base = OTHER; note = thymine
  misc_feature 1..16: note = Antisense oligonucleotide
  modified_base 1: mod_base = OTHER; note = misc_feature - bicyclic nucleic acid scaffold modification
  modified_base 8: mod_base = OTHER; note = misc_feature - bicyclic nucleic acid scaffold modification
  modified_base 12: mod_base = OTHER; note = misc_feature - bicyclic nucleic acid scaffold modification
  modified_base 15..16: mod_base = OTHER; note = misc_feature - bicyclic nucleic acid scaffold modification
  source 1..16: mol_type = other RNA
cctccttccatgactc

SEQ ID NO: 5709 - RNA, 16 nt, synthetic construct
  misc_feature 1..16: note = Antisense oligonucleotide
  modified_base 1: mod_base = OTHER; note = misc_feature - bicyclic nucleic acid scaffold modification
  modified_base 16: mod_base = OTHER; note = misc_feature - bicyclic nucleic acid scaffold modification
  source 1..16: mol_type = other RNA
ctccttccatgactca

SEQ ID NO: 5710 - RNA, 16 nt, synthetic construct
  misc_feature 1..16: note = Antisense oligonucleotide
  modified_base 1: mod_base = OTHER; note = misc_feature - bicyclic nucleic acid scaffold modification
  modified_base 15..16: mod_base = OTHER; note = misc_feature - bicyclic nucleic acid scaffold modification
  source 1..16: mol_type = other RNA
ctccttccatgactca

SEQ ID NO: 5711 - RNA, 16 nt, synthetic construct
  misc_feature 1..16: note = Antisense oligonucleotide
  modified_base 1: mod_base = OTHER; note = misc_feature - bicyclic nucleic acid scaffold modification
  modified_base 13: mod_base = OTHER; note = misc_feature - bicyclic nucleic acid scaffold modification
  modified_base 16: mod_base = OTHER; note = misc_feature - bicyclic nucleic acid scaffold modification
  source 1..16: mol_type = other RNA
ctccttccatgactca

SEQ ID NO: 5712 - RNA, 16 nt, synthetic construct
  misc_feature 1..16: note = Antisense oligonucleotide
  modified_base 1: mod_base = OTHER; note = misc_feature - bicyclic nucleic acid scaffold modification
  modified_base 11: mod_base = OTHER; note = misc_feature - bicyclic nucleic acid scaffold modification
  modified_base 16: mod_base = OTHER; note = misc_feature - bicyclic nucleic acid scaffold modification
  source 1..16: mol_type = other RNA
ctccttccatgactca

SEQ ID NO: 5713 - RNA, 16 nt, synthetic construct
  misc_feature 1..16: note = Antisense oligonucleotide
  modified_base 1: mod_base = OTHER; note = misc_feature - bicyclic nucleic acid scaffold modification
  modified_base 8: mod_base = OTHER; note = misc_feature - bicyclic nucleic acid scaffold modification
  modified_base 16: mod_base = OTHER; note = misc_feature - bicyclic nucleic acid scaffold modification
  source 1..16: mol_type = other RNA
ctccttccatgactca

SEQ ID NO: 5714 - RNA, 16 nt, synthetic construct
  misc_feature 1..16: note = Antisense oligonucleotide
  modified_base 1: mod_base = OTHER; note = misc_feature - bicyclic nucleic acid scaffold modification
  modified_base 4: mod_base = OTHER; note = misc_feature - bicyclic nucleic acid scaffold modification
  modified_base 16: mod_base = OTHER; note = misc_feature - bicyclic nucleic acid scaffold modification
  source 1..16: mol_type = other RNA
ctccttccatgactca

SEQ ID NO: 5715 - RNA, 16 nt, synthetic construct
  misc_feature 1..16: note = Antisense oligonucleotide
  modified_base 1: mod_base = OTHER; note = misc_feature - bicyclic nucleic acid scaffold modification
  modified_base 11: mod_base = OTHER; note = misc_feature - bicyclic nucleic acid scaffold modification
  modified_base 15..16: mod_base = OTHER; note = misc_feature - bicyclic nucleic acid scaffold modification
  source 1..16: mol_type = other RNA
ctccttccatgactca

SEQ ID NO: 5716 - RNA, 16 nt, synthetic construct
  misc_feature 1..16: note = Antisense oligonucleotide
  modified_base 1: mod_base = OTHER; note = misc_feature - bicyclic nucleic acid scaffold modification
  modified_base 8: mod_base = OTHER; note = misc_feature - bicyclic nucleic acid scaffold modification
  modified_base 13: mod_base = OTHER; note = misc_feature - bicyclic nucleic acid scaffold modification
  modified_base 16: mod_base = OTHER; note = misc_feature - bicyclic nucleic acid scaffold modification
  source 1..16: mol_type = other RNA
ctccttccatgactca

SEQ ID NO: 5717 - RNA, 16 nt, synthetic construct
  misc_feature 1..16: note = Antisense oligonucleotide
  modified_base 1: mod_base = OTHER; note = misc_feature - bicyclic nucleic acid scaffold modification
  modified_base 4: mod_base = OTHER; note = misc_feature - bicyclic nucleic acid scaffold modification
  modified_base 11: mod_base = OTHER; note = misc_feature - bicyclic nucleic acid scaffold modification
  modified_base 16: mod_base = OTHER; note = misc_feature - bicyclic nucleic acid scaffold modification
  source 1..16: mol_type = other RNA
ctccttccatgactca

SEQ ID NO: 5718 - RNA, 16 nt, synthetic construct
  modified_base 2: mod_base = OTHER; note = thymine
  misc_feature 1..16: note = Antisense oligonucleotide
  modified_base 1..2: mod_base = OTHER; note = misc_feature - bicyclic nucleic acid scaffold modification
  modified_base 15..16: mod_base = OTHER; note = misc_feature - bicyclic nucleic acid scaffold modification
  source 1..16: mol_type = other RNA
ctccttccatgactca

SEQ ID NO: 5719 - RNA, 16 nt, synthetic construct
  misc_feature 1..16: note = Antisense oligonucleotide
  modified_base 1: mod_base = OTHER; note = misc_feature - bicyclic nucleic acid scaffold modification
  modified_base 4: mod_base = OTHER; note = misc_feature - bicyclic nucleic acid scaffold modification
  modified_base 11: mod_base = OTHER; note = misc_feature - bicyclic nucleic acid scaffold modification
  modified_base 15..16: mod_base = OTHER; note = misc_feature - bicyclic nucleic acid scaffold modification
  source 1..16: mol_type = other RNA
ctccttccatgactca

SEQ ID NO: 5720 - RNA, 16 nt, synthetic construct
  modified_base 1: mod_base = OTHER; note = thymine
  misc_feature 1..16: note = Antisense oligonucleotide
  modified_base 1: mod_base = OTHER; note = misc_feature - bicyclic nucleic acid scaffold modification
  modified_base 16: mod_base = OTHER; note = misc_feature - bicyclic nucleic acid scaffold modification
  source 1..16: mol_type = other RNA
tccttccatgactcaa

SEQ ID NO: 5721 - RNA, 16 nt, synthetic construct
  modified_base 1: mod_base = OTHER; note = thymine
  misc_feature 1..16: note = Antisense oligonucleotide
  modified_base 1: mod_base = OTHER; note = misc_feature - bicyclic nucleic acid scaffold modification
  modified_base 14: mod_base = OTHER; note = misc_feature - bicyclic nucleic acid scaffold modification
  modified_base 16: mod_base = OTHER; note = misc_feature - bicyclic nucleic acid scaffold modification
  source 1..16: mol_type = other RNA
tccttccatgactcaa

SEQ ID NO: 5722 - RNA, 16 nt, synthetic construct
  modified_base 1: mod_base = OTHER; note = thymine
  misc_feature 1..16: note = Antisense oligonucleotide
  modified_base 1: mod_base = OTHER; note = misc_feature - bicyclic nucleic acid scaffold modification
  modified_base 12: mod_base = OTHER; note = misc_feature - bicyclic nucleic acid scaffold modification
  modified_base 16: mod_base = OTHER; note = misc_feature - bicyclic nucleic acid scaffold modification
  source 1..16: mol_type = other RNA
tccttccatgactcaa

SEQ ID NO: 5723 - RNA, 16 nt, synthetic construct
  modified_base 1: mod_base = OTHER; note = thymine
  misc_feature 1..16: note = Antisense oligonucleotide
  modified_base 1: mod_base = OTHER; note = misc_feature - bicyclic nucleic acid scaffold modification
  modified_base 10: mod_base = OTHER; note = misc_feature - bicyclic nucleic acid scaffold modification
  modified_base 16: mod_base = OTHER; note = misc_feature - bicyclic nucleic acid scaffold modification
  source 1..16: mol_type = other RNA
tccttccatgactcaa

SEQ ID NO: 5724 - RNA, 16 nt, synthetic construct
  modified_base 1: mod_base = OTHER; note = thymine
  misc_feature 1..16: note = Antisense oligonucleotide
  modified_base 1: mod_base = OTHER; note = misc_feature - bicyclic nucleic acid scaffold modification
  modified_base 7: mod_base = OTHER; note = misc_feature - bicyclic nucleic acid scaffold modification
  modified_base 16: mod_base = OTHER; note = misc_feature - bicyclic nucleic acid scaffold modification
  source 1..16: mol_type = other RNA
tccttccatgactcaa

SEQ ID NO: 5725 - RNA, 16 nt, synthetic construct
  modified_base 1: mod_base = OTHER; note = thymine
  misc_feature 1..16: note = Antisense oligonucleotide
  modified_base 1: mod_base = OTHER; note = misc_feature - bicyclic nucleic acid scaffold modification
  modified_base 3: mod_base = OTHER; note = misc_feature - bicyclic nucleic acid scaffold modification
  modified_base 16: mod_base = OTHER; note = misc_feature - bicyclic nucleic acid scaffold modification
  source 1..16: mol_type = other RNA
tccttccatgactcaa

SEQ ID NO: 5726 - RNA, 16 nt, synthetic construct
  modified_base 1: mod_base = OTHER; note = thymine
  misc_feature 1..16: note = Antisense oligonucleotide
  modified_base 1: mod_base = OTHER; note = misc_feature - bicyclic nucleic acid scaffold modification
  modified_base 10: mod_base = OTHER; note = misc_feature - bicyclic nucleic acid scaffold modification
  modified_base 14: mod_base = OTHER; note = misc_feature - bicyclic nucleic acid scaffold modification
  modified_base 16: mod_base = OTHER; note = misc_feature - bicyclic nucleic acid scaffold modification
  source 1..16: mol_type = other RNA
tccttccatgactcaa

SEQ ID NO: 5727 - RNA, 16 nt, synthetic construct
  modified_base 1: mod_base = OTHER; note = thymine
  misc_feature 1..16: note = Antisense oligonucleotide
  modified_base 1: mod_base = OTHER; note = misc_feature - bicyclic nucleic acid scaffold modification
  modified_base 7: mod_base = OTHER; note = misc_feature - bicyclic nucleic acid scaffold modification
  modified_base 12: mod_base = OTHER; note = misc_feature - bicyclic nucleic acid scaffold modification
  modified_base 16: mod_base = OTHER; note = misc_feature - bicyclic nucleic acid scaffold modification
  source 1..16: mol_type = other RNA
tccttccatgactcaa

SEQ ID NO: 5728 - RNA, 16 nt, synthetic construct
  modified_base 1: mod_base = OTHER; note = thymine
  misc_feature 1..16: note = Antisense oligonucleotide
  modified_base 1: mod_base = OTHER; note = misc_feature - bicyclic nucleic acid scaffold modification
  modified_base 3: mod_base = OTHER; note = misc_feature - bicyclic nucleic acid scaffold modification
  modified_base 10: mod_base = OTHER; note = misc_feature - bicyclic nucleic acid scaffold modification
  modified_base 16: mod_base = OTHER; note = misc_feature - bicyclic nucleic acid scaffold modification
  source 1..16: mol_type = other RNA
tccttccatgactcaa

SEQ ID NO: 5729 - RNA, 16 nt, synthetic construct
  modified_base 1: mod_base = OTHER; note = thymine
  misc_feature 1..16: note = Antisense oligonucleotide
  modified_base 1..2: mod_base = OTHER; note = misc_feature - bicyclic nucleic acid scaffold modification
  modified_base 14..16: mod_base = OTHER; note = misc_feature - bicyclic nucleic acid scaffold modification
  source 1..16: mol_type = other RNA
tccttccatgactcaa

SEQ ID NO: 5730 - RNA, 16 nt, synthetic construct
  modified_base 1: mod_base = OTHER; note = thymine
  misc_feature 1..16: note = Antisense oligonucleotide
  modified_base 1: mod_base = OTHER; note = misc_feature - bicyclic nucleic acid scaffold modification
  modified_base 10: mod_base = OTHER; note = misc_feature - bicyclic nucleic acid scaffold modification
  modified_base 14..16: mod_base = OTHER; note = misc_feature - bicyclic nucleic acid scaffold modification
  source 1..16: mol_type = other RNA
tccttccatgactcaa

SEQ ID NO: 5731 - RNA, 16 nt, synthetic construct
  misc_feature 1..16: note = Antisense oligonucleotide
  modified_base 1: mod_base = OTHER; note = misc_feature - bicyclic nucleic acid scaffold modification
  modified_base 16: mod_base = OTHER; note = misc_feature - bicyclic nucleic acid scaffold modification
  source 1..16: mol_type = other RNA
ccttccatgactcaag

SEQ ID NO: 5732 - RNA, 16 nt, synthetic construct
  misc_feature 1..16: note = Antisense oligonucleotide
  modified_base 1: mod_base = OTHER; note = misc_feature - bicyclic nucleic acid scaffold modification
  modified_base 13: mod_base = OTHER; note = misc_feature - bicyclic nucleic acid scaffold modification
  modified_base 16: mod_base = OTHER; note = misc_feature - bicyclic nucleic acid scaffold modification
  source 1..16: mol_type = other RNA
ccttccatgactcaag

SEQ ID NO: 5733 - RNA, 16 nt, synthetic construct
  misc_feature 1..16: note = Antisense oligonucleotide
  modified_base 1: mod_base = OTHER; note = misc_feature - bicyclic nucleic acid scaffold modification
  modified_base 11: mod_base = OTHER; note = misc_feature - bicyclic nucleic acid scaffold modification
  modified_base 16: mod_base = OTHER; note = misc_feature - bicyclic nucleic acid scaffold modification
  source 1..16: mol_type = other RNA
ccttccatgactcaag

SEQ ID NO: 5734 - RNA, 16 nt, synthetic construct
  misc_feature 1..16: note = Antisense oligonucleotide
  modified_base 1: mod_base = OTHER; note = misc_feature - bicyclic nucleic acid scaffold modification
  modified_base 9: mod_base = OTHER; note = misc_feature - bicyclic nucleic acid scaffold modification
  modified_base 16: mod_base = OTHER; note = misc_feature - bicyclic nucleic acid scaffold modification
  source 1..16: mol_type = other RNA
ccttccatgactcaag

SEQ ID NO: 5735 - RNA, 16 nt, synthetic construct
  misc_feature 1..16: note = Antisense oligonucleotide
  modified_base 1: mod_base = OTHER; note = misc_feature - bicyclic nucleic acid scaffold modification
  modified_base 6: mod_base = OTHER; note = misc_feature - bicyclic nucleic acid scaffold modification
  modified_base 16: mod_base = OTHER; note = misc_feature - bicyclic nucleic acid scaffold modification
  source 1..16: mol_type = other RNA
ccttccatgactcaag

SEQ ID NO: 5736 - RNA, 16 nt, synthetic construct
  misc_feature 1..16: note = Antisense oligonucleotide
  modified_base 1..2: mod_base = OTHER; note = misc_feature - bicyclic nucleic acid scaffold modification
  modified_base 16: mod_base = OTHER; note = misc_feature - bicyclic nucleic acid scaffold modification
  source 1..16: mol_type = other RNA
ccttccatgactcaag

SEQ ID NO: 5737 - RNA, 16 nt, synthetic construct
  misc_feature 1..16: note = Antisense oligonucleotide
  modified_base 1: mod_base = OTHER; note = misc_feature - bicyclic nucleic acid scaffold modification
  modified_base 9: mod_base = OTHER; note = misc_feature - bicyclic nucleic acid scaffold modification
  modified_base 13: mod_base = OTHER; note = misc_feature - bicyclic nucleic acid scaffold modification
  modified_base 16: mod_base = OTHER; note = misc_feature - bicyclic nucleic acid scaffold modification
  source 1..16: mol_type = other RNA
ccttccatgactcaag

SEQ ID NO: 5738 - RNA, 16 nt, synthetic construct
  misc_feature 1..16: note = Antisense oligonucleotide
  modified_base 1: mod_base = OTHER; note = misc_feature - bicyclic nucleic acid scaffold modification
  modified_base 6: mod_base = OTHER; note = misc_feature - bicyclic nucleic acid scaffold modification
  modified_base 11: mod_base = OTHER; note = misc_feature - bicyclic nucleic acid scaffold modification
  modified_base 16: mod_base = OTHER; note = misc_feature - bicyclic nucleic acid scaffold modification
  source 1..16: mol_type = other RNA
ccttccatgactcaag

SEQ ID NO: 5739 - RNA, 16 nt, synthetic construct
  misc_feature 1..16: note = Antisense oligonucleotide
  modified_base 1..2: mod_base = OTHER; note = misc_feature - bicyclic nucleic acid scaffold modification
  modified_base 9: mod_base = OTHER; note = misc_feature - bicyclic nucleic acid scaffold modification
  modified_base 16: mod_base = OTHER; note = misc_feature - bicyclic nucleic acid scaffold modification
  source 1..16: mol_type = other RNA
ccttccatgactcaag

SEQ ID NO: 5740 - RNA, 16 nt, synthetic construct
  misc_feature 1..16: note = Antisense oligonucleotide
  modified_base 1..2: mod_base = OTHER; note = misc_feature - bicyclic nucleic acid scaffold modification
  modified_base 15..16: mod_base = OTHER; note = misc_feature - bicyclic nucleic acid scaffold modification
  source 1..16: mol_type = other RNA
ccttccatgactcaag

SEQ ID NO: 5741 - RNA, 16 nt, synthetic construct
  misc_feature 1..16: note = Antisense oligonucleotide
  modified_base 1: mod_base = OTHER; note = misc_feature - bicyclic nucleic acid scaffold modification
  modified_base 5: mod_base = OTHER; note = misc_feature - bicyclic nucleic acid scaffold modification
  modified_base 9: mod_base = OTHER; note = misc_feature - bicyclic nucleic acid scaffold modification
  modified_base 15..16: mod_base = OTHER; note = misc_feature - bicyclic nucleic acid scaffold modification
  source 1..16: mol_type = other RNA
ccttccatgactcaag

SEQ ID NO: 5742 - RNA, 16 nt, synthetic construct
  misc_feature 1..16: note = Antisense oligonucleotide
  modified_base 1: mod_base = OTHER; note = misc_feature - bicyclic nucleic acid scaffold modification
  modified_base 16: mod_base = OTHER; note = misc_feature - bicyclic nucleic acid scaffold modification
  source 1..16: mol_type = other RNA
cttccatgactcaagc

SEQ ID NO: 5743 - RNA, 16 nt, synthetic construct
  misc_feature 1..16: note = Antisense oligonucleotide
  modified_base 1: mod_base = OTHER; note = misc_feature - bicyclic nucleic acid scaffold modification
  modified_base 15..16: mod_base = OTHER; note = misc_feature - bicyclic nucleic acid scaffold modification
  source 1..16: mol_type = other RNA
cttccatgactcaagc

SEQ ID NO: 5744 - RNA, 16 nt, synthetic construct
  misc_feature 1..16: note = Antisense oligonucleotide
  modified_base 1: mod_base = OTHER; note = misc_feature - bicyclic nucleic acid scaffold modification
  modified_base 12: mod_base = OTHER; note = misc_feature - bicyclic nucleic acid scaffold modification
  modified_base 16: mod_base = OTHER; note = misc_feature - bicyclic nucleic acid scaffold modification
  source 1..16: mol_type = other RNA
cttccatgactcaagc

SEQ ID NO: 5745 - RNA, 16 nt, synthetic construct
  misc_feature 1..16: note = Antisense oligonucleotide
  modified_base 1: mod_base = OTHER; note = misc_feature - bicyclic nucleic acid scaffold modification
  modified_base 10: mod_base = OTHER; note = misc_feature - bicyclic nucleic acid scaffold modification
  modified_base 16: mod_base = OTHER; note = misc_feature - bicyclic nucleic acid scaffold modification
  source 1..16: mol_type = other RNA
cttccatgactcaagc

SEQ ID NO: 5746 - RNA, 16 nt, synthetic construct
  misc_feature 1..16: note = Antisense oligonucleotide
  modified_base 1: mod_base = OTHER; note = misc_feature - bicyclic nucleic acid scaffold modification
  modified_base 8: mod_base = OTHER; note = misc_feature - bicyclic nucleic acid scaffold modification
  modified_base 16: mod_base = OTHER; note = misc_feature - bicyclic nucleic acid scaffold modification
  source 1..16: mol_type = other RNA
cttccatgactcaagc

SEQ ID NO: 5747 - RNA, 16 nt, synthetic construct
  misc_feature 1..16: note = Antisense oligonucleotide
  modified_base 1: mod_base = OTHER; note = misc_feature - bicyclic nucleic acid scaffold modification
  modified_base 5: mod_base = OTHER; note = misc_feature - bicyclic nucleic acid scaffold modification
  modified_base 16: mod_base = OTHER; note = misc_feature - bicyclic nucleic acid scaffold modification
  source 1..16: mol_type = other RNA
cttccatgactcaagc

SEQ ID NO: 5748 - RNA, 16 nt, synthetic construct
  misc_feature 1..16: note = Antisense oligonucleotide
  modified_base 1: mod_base = OTHER; note = misc_feature - bicyclic nucleic acid scaffold modification
  modified_base 8: mod_base = OTHER; note = misc_feature - bicyclic nucleic acid scaffold modification
  modified_base 15..16: mod_base = OTHER; note = misc_feature - bicyclic nucleic acid scaffold modification
  source 1..16: mol_type = other RNA
cttccatgactcaagc

SEQ ID NO: 5749 - RNA, 16 nt, synthetic construct
  misc_feature 1..16: note = Antisense oligonucleotide
  modified_base 1: mod_base = OTHER; note = misc_feature - bicyclic nucleic acid scaffold modification
  modified_base 5: mod_base = OTHER; note = misc_feature - bicyclic nucleic acid scaffold modification
  modified_base 12: mod_base = OTHER; note = misc_feature - bicyclic nucleic acid scaffold modification
  modified_base 16: mod_base = OTHER; note = misc_feature - bicyclic nucleic acid scaffold modification
  source 1..16: mol_type = other RNA
cttccatgactcaagc

SEQ ID NO: 5750 - RNA, 16 nt, synthetic construct
  modified_base 2: mod_base = OTHER; note = thymine
  misc_feature 1..16: note = Antisense oligonucleotide
  modified_base 1..2: mod_base = OTHER; note = misc_feature - bicyclic nucleic acid scaffold modification
  modified_base 8: mod_base = OTHER; note = misc_feature - bicyclic nucleic acid scaffold modification
  modified_base 10: mod_base = OTHER; note = misc_feature - bicyclic nucleic acid scaffold modification
  modified_base 16: mod_base = OTHER; note = misc_feature - bicyclic nucleic acid scaffold modification
  source 1..16: mol_type = other RNA
cttccatgactcaagc

SEQ ID NO: 5751 - RNA, 16 nt, synthetic construct
  modified_base 2: mod_base = OTHER; note = thymine
  misc_feature 1..16: note = Antisense oligonucleotide
  modified_base 1..2: mod_base = OTHER; note = misc_feature - bicyclic nucleic acid scaffold modification
  modified_base 8: mod_base = OTHER; note = misc_feature - bicyclic nucleic acid scaffold modification
  modified_base 15..16: mod_base = OTHER; note = misc_feature - bicyclic nucleic acid scaffold modification
  source 1..16: mol_type = other RNA
cttccatgactcaagc

SEQ ID NO: 5752 - RNA, 16 nt, synthetic construct
  misc_feature 1..16: note = Antisense oligonucleotide
  modified_base 1: mod_base = OTHER; note = misc_feature - bicyclic nucleic acid scaffold modification
  modified_base 8: mod_base = OTHER; note = misc_feature - bicyclic nucleic acid scaffold modification
  modified_base 10: mod_base = OTHER; note = misc_feature - bicyclic nucleic acid scaffold modification
  modified_base 15..16: mod_base = OTHER; note = misc_feature - bicyclic nucleic acid scaffold modification
  source 1..16: mol_type = other RNA
cttccatgactcaagc

SEQ ID NO: 5753 - RNA, 16 nt, synthetic construct
  modified_base 1: mod_base = OTHER; note = thymine
  modified_base 16: mod_base = OTHER; note = thymine
  misc_feature 1..16: note = Antisense oligonucleotide
  modified_base 1: mod_base = OTHER; note = misc_feature - bicyclic nucleic acid scaffold modification
  modified_base 16: mod_base = OTHER; note = misc_feature - bicyclic nucleic acid scaffold modification
  source 1..16: mol_type = other RNA
ttccatgactcaagct

SEQ ID NO: 5754 - RNA, 16 nt, synthetic construct
  modified_base 1: mod_base = OTHER; note = thymine
  modified_base 16: mod_base = OTHER; note = thymine
  misc_feature 1..16: note = Antisense oligonucleotide
  modified_base 1: mod_base = OTHER; note = misc_feature - bicyclic nucleic acid scaffold modification
  modified_base 15..16: mod_base = OTHER; note = misc_feature - bicyclic nucleic acid scaffold modification
  source 1..16: mol_type = other RNA
ttccatgactcaagct

SEQ ID NO: 5755 - RNA, 16 nt, synthetic construct
  modified_base 1: mod_base = OTHER; note = thymine
  modified_base 16: mod_base = OTHER; note = thymine
  misc_feature 1..16: note = Antisense oligonucleotide
  modified_base 1: mod_base = OTHER; note = misc_feature - bicyclic nucleic acid scaffold modification
  modified_base 14: mod_base = OTHER; note = misc_feature - bicyclic nucleic acid scaffold modification
  modified_base 16: mod_base = OTHER; note = misc_feature - bicyclic nucleic acid scaffold modification
  source 1..16: mol_type = other RNA
ttccatgactcaagct

SEQ ID NO: 5756 - RNA, 16 nt, synthetic construct
  modified_base 1: mod_base = OTHER; note = thymine
  modified_base 16: mod_base = OTHER; note = thymine
  misc_feature 1..16: note = Antisense oligonucleotide
  modified_base 1: mod_base = OTHER; note = misc_feature - bicyclic nucleic acid scaffold modification
  modified_base 11: mod_base = OTHER; note = misc_feature - bicyclic nucleic acid scaffold modification
  modified_base 16: mod_base = OTHER; note = misc_feature - bicyclic nucleic acid scaffold modification
  source 1..16: mol_type = other RNA
ttccatgactcaagct

SEQ ID NO: 5757 - RNA, 16 nt, synthetic construct
  modified_base 1: mod_base = OTHER; note = thymine
  modified_base 16: mod_base = OTHER; note = thymine
  misc_feature 1..16: note = Antisense oligonucleotide
  modified_base 1: mod_base = OTHER; note = misc_feature - bicyclic nucleic acid scaffold modification
  modified_base 9: mod_base = OTHER; note = misc_feature - bicyclic nucleic acid scaffold modification
  modified_base 16: mod_base = OTHER; note = misc_feature - bicyclic nucleic acid scaffold modification
  source 1..16: mol_type = other RNA
ttccatgactcaagct

SEQ ID NO: 5758 - RNA, 16 nt, synthetic construct
  modified_base 1: mod_base = OTHER; note = thymine
  modified_base 16: mod_base = OTHER; note = thymine
  misc_feature 1..16: note = Antisense oligonucleotide
  modified_base 1: mod_base = OTHER; note = misc_feature - bicyclic nucleic acid scaffold modification
  modified_base 7: mod_base = OTHER; note = misc_feature - bicyclic nucleic acid scaffold modification
  modified_base 16: mod_base = OTHER; note = misc_feature - bicyclic nucleic acid scaffold modification
  source 1..16: mol_type = other RNA
ttccatgactcaagct

SEQ ID NO: 5759 - RNA, 16 nt, synthetic construct
  modified_base 1: mod_base = OTHER; note = thymine
  modified_base 16: mod_base = OTHER; note = thymine
  misc_feature 1..16: note = Antisense oligonucleotide
  modified_base 1: mod_base = OTHER; note = misc_feature - bicyclic nucleic acid scaffold modification
  modified_base 4: mod_base = OTHER; note = misc_feature - bicyclic nucleic acid scaffold modification
  modified_base 16: mod_base = OTHER; note = misc_feature - bicyclic nucleic acid scaffold modification
  source 1..16: mol_type = other RNA
ttccatgactcaagct

SEQ ID NO: 5760 - RNA, 16 nt, synthetic construct
  modified_base 1: mod_base = OTHER; note = thymine
  modified_base 16: mod_base = OTHER; note = thymine
  misc_feature 1..16: note = Antisense oligonucleotide
  modified_base 1: mod_base = OTHER; note = misc_feature - bicyclic nucleic acid scaffold modification
  modified_base 9: mod_base = OTHER; note = misc_feature - bicyclic nucleic acid scaffold modification
  modified_base 15..16: mod_base = OTHER; note = misc_feature - bicyclic nucleic acid scaffold modification
  source 1..16: mol_type = other RNA
ttccatgactcaagct

SEQ ID NO: 5761 - RNA, 16 nt, synthetic construct
  modified_base 1: mod_base = OTHER; note = thymine
  modified_base 16: mod_base = OTHER; note = thymine
  misc_feature 1..16: note = Antisense oligonucleotide
  modified_base 1: mod_base = OTHER; note = misc_feature - bicyclic nucleic acid scaffold modification
  modified_base 7: mod_base = OTHER; note = misc_feature - bicyclic nucleic acid scaffold modification
  modified_base 14: mod_base = OTHER; note = misc_feature - bicyclic nucleic acid scaffold modification
  modified_base 16: mod_base = OTHER; note = misc_feature - bicyclic nucleic acid scaffold modification
  source 1..16: mol_type = other RNA
ttccatgactcaagct

SEQ ID NO: 5762 - RNA, 16 nt, synthetic construct
  modified_base 1: mod_base = OTHER; note = thymine
  modified_base 16: mod_base = OTHER; note = thymine
  misc_feature 1..16: note = Antisense oligonucleotide
  modified_base 1: mod_base = OTHER; note = misc_feature - bicyclic nucleic acid scaffold modification
  modified_base 7: mod_base = OTHER; note = misc_feature - bicyclic nucleic acid scaffold modification
  modified_base 15..16: mod_base = OTHER; note = misc_feature - bicyclic nucleic acid scaffold modification
  source 1..16: mol_type = other RNA
ttccatgactcaagct

SEQ ID NO: 5763 - RNA, 16 nt, synthetic construct
  modified_base 1..2: mod_base = OTHER; note = thymine
  modified_base 16: mod_base = OTHER; note = thymine
  misc_feature 1..16: note = Antisense oligonucleotide
  modified_base 1..2: mod_base = OTHER; note = misc_feature - bicyclic nucleic acid scaffold modification
  modified_base 15..16: mod_base = OTHER; note = misc_feature - bicyclic nucleic acid scaffold modification
  source 1..16: mol_type = other RNA
ttccatgactcaagct

SEQ ID NO: 5764 - RNA, 16 nt, synthetic construct
  modified_base 1: mod_base = OTHER; note = thymine
  modified_base 16: mod_base = OTHER; note = thymine
  misc_feature 1..16: note = Antisense oligonucleotide
  modified_base 1..2: mod_base = OTHER; note = misc_feature - bicyclic nucleic acid scaffold modification
  modified_base 7: mod_base = OTHER; note = misc_feature - bicyclic nucleic acid scaffold modification
  modified_base 14..16: mod_base = OTHER; note = misc_feature - bicyclic nucleic acid scaffold modification
  source 1..16: mol_type = other RNA
ttccatgactcaagct

SEQ ID NO: 5765 - RNA, 24 nt, synthetic construct
  modified_base 24: mod_base = OTHER; note = thymine
  misc_feature 1..24: note = Antisense oligonucleotide
  modified_base 1: mod_base = OTHER; note = misc_feature - bicyclic nucleic acid scaffold modification
  modified_base 24: mod_base = OTHER; note = misc_feature - bicyclic nucleic acid scaffold modification
  source 1..24: mol_type = other RNA
cattcaactgttgcctccggttct

SEQ ID NO: 5766 - RNA, 24 nt, synthetic construct
  modified_base 24: mod_base = OTHER; note = thymine
  misc_feature 1..24: note = Antisense oligonucleotide
  modified_base 1: mod_base = OTHER; note = misc_feature - bicyclic nucleic acid scaffold modification
  modified_base 23..24: mod_base = OTHER; note = misc_feature - bicyclic nucleic acid scaffold modification
  source 1..24: mol_type = other RNA
cattcaactgttgcctccggttct

SEQ ID NO: 5767 - RNA, 24 nt, synthetic construct
  modified_base 24: mod_base = OTHER; note = thymine
  misc_feature 1..24: note = Antisense oligonucleotide
  modified_base 1: mod_base = OTHER; note = misc_feature - bicyclic nucleic acid scaffold modification
  modified_base 20: mod_base = OTHER; note = misc_feature - bicyclic nucleic acid scaffold modification
  modified_base 24: mod_base = OTHER; note = misc_feature - bicyclic nucleic acid scaffold modification
  source 1..24: mol_type = other RNA
cattcaactgttgcctccggttct

SEQ ID NO: 5768 - RNA, 24 nt, synthetic construct
  modified_base 24: mod_base = OTHER; note = thymine
  misc_feature 1..24: note = Antisense oligonucleotide
  modified_base 1: mod_base = OTHER; note = misc_feature - bicyclic nucleic acid scaffold modification
  modified_base 15: mod_base = OTHER; note = misc_feature - bicyclic nucleic acid scaffold modification
  modified_base 24: mod_base = OTHER; note = misc_feature - bicyclic nucleic acid scaffold modification
  source 1..24: mol_type = other RNA
cattcaactgttgcctccggttct

SEQ ID NO: 5769 - RNA, 24 nt, synthetic construct
  modified_base 24: mod_base = OTHER; note = thymine
  misc_feature 1..24: note = Antisense oligonucleotide
  modified_base 1: mod_base = OTHER; note = misc_feature - bicyclic nucleic acid scaffold modification
  modified_base 10: mod_base = OTHER; note = misc_feature - bicyclic nucleic acid scaffold modification
  modified_base 24: mod_base = OTHER; note = misc_feature - bicyclic nucleic acid scaffold modification
  source 1..24: mol_type = other RNA
cattcaactgttgcctccggttct

SEQ ID NO: 5770 - RNA, 24 nt, synthetic construct
  modified_base 24: mod_base = OTHER; note = thymine
  misc_feature 1..24: note = Antisense oligonucleotide
  modified_base 1: mod_base = OTHER; note = misc_feature - bicyclic nucleic acid scaffold modification
  modified_base 8: mod_base = OTHER; note = misc_feature - bicyclic nucleic acid scaffold modification
  modified_base 24: mod_base = OTHER; note = misc_feature - bicyclic nucleic acid scaffold modification
  source 1..24: mol_type = other RNA
cattcaactgttgcctccggttct

SEQ ID NO: 5771 - RNA, 24 nt, synthetic construct
  modified_base 24: mod_base = OTHER; note = thymine
  misc_feature 1..24: note = Antisense oligonucleotide
  modified_base 1: mod_base = OTHER; note = misc_feature - bicyclic nucleic acid scaffold modification
  modified_base 5: mod_base = OTHER; note = misc_feature - bicyclic nucleic acid scaffold modification
  modified_base 24: mod_base = OTHER; note = misc_feature - bicyclic nucleic acid scaffold modification
  source 1..24: mol_type = other RNA
cattcaactgttgcctccggttct

SEQ ID NO: 5772 - RNA, 24 nt, synthetic construct
  modified_base 24: mod_base = OTHER; note = thymine
  misc_feature 1..24: note = Antisense oligonucleotide
  modified_base 1: mod_base = OTHER; note = misc_feature - bicyclic nucleic acid scaffold modification
  modified_base 5: mod_base = OTHER; note = misc_feature - bicyclic nucleic acid scaffold modification
  modified_base 10: mod_base = OTHER; note = misc_feature - bicyclic nucleic acid scaffold modification
  modified_base 24: mod_base = OTHER; note = misc_feature - bicyclic nucleic acid scaffold modification
  source 1..24: mol_type = other RNA
cattcaactgttgcctccggttct

SEQ ID NO: 5773 - RNA, 24 nt, synthetic construct
  modified_base 24: mod_base = OTHER; note = thymine
  misc_feature 1..24: note = Antisense oligonucleotide
  modified_base 1: mod_base = OTHER; note = misc_feature - bicyclic nucleic acid scaffold modification
  modified_base 10: mod_base = OTHER; note = misc_feature - bicyclic nucleic acid scaffold modification
  modified_base 23..24: mod_base = OTHER; note = misc_feature - bicyclic nucleic acid scaffold modification
  source 1..24: mol_type = other RNA
cattcaactgttgcctccggttct

SEQ ID NO: 5774 - RNA, 24 nt, synthetic construct
  modified_base 24: mod_base = OTHER; note = thymine
  misc_feature 1..24: note = Antisense oligonucleotide
  modified_base 1: mod_base = OTHER; note = misc_feature - bicyclic nucleic acid scaffold modification
  modified_base 5: mod_base = OTHER; note = misc_feature - bicyclic nucleic acid scaffold modification
  modified_base 10: mod_base = OTHER; note = misc_feature - bicyclic nucleic acid scaffold modification
  modified_base 23..24: mod_base = OTHER; note = misc_feature - bicyclic nucleic acid scaffold modification
  source 1..24: mol_type = other RNA
cattcaactgttgcctccggttct

SEQ ID NO: 5775 - RNA, 24 nt, synthetic construct
  modified_base 24: mod_base = OTHER; note = thymine
  misc_feature 1..24: note = Antisense oligonucleotide
  modified_base 1..2: mod_base = OTHER; note = misc_feature - bicyclic nucleic acid scaffold modification
  modified_base 23..24: mod_base = OTHER; note = misc_feature - bicyclic nucleic acid scaffold modification
  source 1..24: mol_type = other RNA
cattcaactgttgcctccggttct

SEQ ID NO: 5776 - RNA, 24 nt, synthetic construct
  modified_base 24: mod_base = OTHER; note = thymine
  misc_feature 1..24: note = Antisense oligonucleotide
  modified_base 1: mod_base = OTHER; note = misc_feature - bicyclic nucleic acid scaffold modification
  modified_base 23..24: mod_base = OTHER; note = misc_feature - bicyclic nucleic acid scaffold modification
  source 1..24: mol_type = other RNA
cattcaactgttgcctccggttct

SEQ ID NO: 5777 - RNA, 24 nt, synthetic construct
  modified_base 24: mod_base = OTHER; note = thymine
  misc_feature 1..24: note = Antisense oligonucleotide
  modified_base 1: mod_base = OTHER; note = misc_feature - bicyclic nucleic acid scaffold modification
  modified_base 5: mod_base = OTHER; note = misc_feature - bicyclic nucleic acid scaffold modification
  modified_base 8: mod_base = OTHER; note = misc_feature - bicyclic nucleic acid scaffold modification
  modified_base 10: mod_base = OTHER; note = misc_feature - bicyclic nucleic acid scaffold modification
  modified_base 24: mod_base = OTHER; note = misc_feature - bicyclic nucleic acid scaffold modification
  source 1..24: mol_type = other RNA
cattcaactgttgcctccggttct

SEQ ID NO: 5778 - RNA, 24 nt, synthetic construct
  modified_base 24: mod_base = OTHER; note = thymine
  misc_feature 1..24: note = Antisense oligonucleotide
  modified_base 1: mod_base = OTHER; note = misc_feature - bicyclic nucleic acid scaffold modification
  modified_base 10: mod_base = OTHER; note = misc_feature - bicyclic nucleic acid scaffold modification
  modified_base 15: mod_base = OTHER; note = misc_feature - bicyclic nucleic acid scaffold modification
  modified_base 20: mod_base = OTHER; note = misc_feature - bicyclic nucleic acid scaffold modification
  modified_base 23..24: mod_base = OTHER; note = misc_feature - bicyclic nucleic acid scaffold modification
  source 1..24: mol_type = other RNA
cattcaactgttgcctccggttct

SEQ ID NO: 5779 - RNA, 22 nt, synthetic construct
  modified_base 22: mod_base = OTHER; note = thymine
  misc_feature 1..22: note = Antisense oligonucleotide
  modified_base 1: mod_base = OTHER; note = misc_feature - bicyclic nucleic acid scaffold modification
  modified_base 22: mod_base = OTHER; note = misc_feature - bicyclic nucleic acid scaffold modification
  source 1..22: mol_type = other RNA
cattcaactgttgcctccggtt

SEQ ID NO: 5780 - RNA, 22 nt, synthetic construct
  modified_base 22: mod_base = OTHER; note = thymine
  misc_feature 1..22: note = Antisense oligonucleotide
  modified_base 1: mod_base = OTHER; note = misc_feature - bicyclic nucleic acid scaffold modification
  modified_base 20: mod_base = OTHER; note = misc_feature - bicyclic nucleic acid scaffold modification
  modified_base 22: mod_base = OTHER; note = misc_feature - bicyclic nucleic acid scaffold modification
  source 1..22: mol_type = other RNA
cattcaactgttgcctccggtt

SEQ ID NO: 5781 - RNA, 22 nt, synthetic construct
  modified_base 22: mod_base = OTHER; note = thymine
  misc_feature 1..22: note = Antisense oligonucleotide
  modified_base 1: mod_base = OTHER; note = misc_feature - bicyclic nucleic acid scaffold modification
  modified_base 15: mod_base = OTHER; note = misc_feature - bicyclic nucleic acid scaffold modification
  modified_base 22: mod_base = OTHER; note = misc_feature - bicyclic nucleic acid scaffold modification
  source 1..22: mol_type = other RNA
cattcaactgttgcctccggtt

SEQ ID NO: 5782 - RNA, 22 nt, synthetic construct
  modified_base 22: mod_base = OTHER; note = thymine
  misc_feature 1..22: note = Antisense oligonucleotide
  modified_base 1: mod_base = OTHER; note = misc_feature - bicyclic nucleic acid scaffold modification
  modified_base 10: mod_base = OTHER; note = misc_feature - bicyclic nucleic acid scaffold modification
  modified_base 22: mod_base = OTHER; note = misc_feature - bicyclic nucleic acid scaffold modification
  source 1..22: mol_type = other RNA
cattcaactgttgcctccggtt

SEQ ID NO: 5783 - RNA, 22 nt, synthetic construct
  modified_base 22: mod_base = OTHER; note = thymine
  misc_feature 1..22: note = Antisense oligonucleotide
  modified_base 1: mod_base = OTHER; note = misc_feature - bicyclic nucleic acid scaffold modification
  modified_base 8: mod_base = OTHER; note = misc_feature - bicyclic nucleic acid scaffold modification
  modified_base 22: mod_base = OTHER; note = misc_feature - bicyclic nucleic acid scaffold modification
  source 1..22: mol_type = other RNA
cattcaactgttgcctccggtt

SEQ ID NO: 5784 - RNA, 22 nt, synthetic construct
  modified_base 22: mod_base = OTHER; note = thymine
  misc_feature 1..22: note = Antisense oligonucleotide
  modified_base 1: mod_base = OTHER; note = misc_feature - bicyclic nucleic acid scaffold modification
  modified_base 5: mod_base = OTHER; note = misc_feature - bicyclic nucleic acid scaffold modification
  modified_base 22: mod_base = OTHER; note = misc_feature - bicyclic nucleic acid scaffold modification
  source 1..22: mol_type = other RNA
cattcaactgttgcctccggtt

SEQ ID NO: 5785 - RNA, 22 nt, synthetic construct
  modified_base 22: mod_base = OTHER; note = thymine
  misc_feature 1..22: note = Antisense oligonucleotide
  modified_base 1: mod_base = OTHER; note = misc_feature - bicyclic nucleic acid scaffold modification
  modified_base 10: mod_base = OTHER; note = misc_feature - bicyclic nucleic acid scaffold modification
  modified_base 20: mod_base = OTHER; note = misc_feature - bicyclic nucleic acid scaffold modification
  modified_base 22: mod_base = OTHER; note = misc_feature - bicyclic nucleic acid scaffold modification
  source 1..22: mol_type = other RNA
cattcaactgttgcctccggtt

SEQ ID NO: 5786 - RNA, 22 nt, synthetic construct
  modified_base 22: mod_base = OTHER; note = thymine
  misc_feature 1..22: note = Antisense oligonucleotide
  modified_base 1: mod_base = OTHER; note = misc_feature - bicyclic nucleic acid scaffold modification
  modified_base 5: mod_base = OTHER; note = misc_feature - bicyclic nucleic acid scaffold modification
  modified_base 10: mod_base = OTHER; note = misc_feature - bicyclic nucleic acid scaffold modification
  modified_base 22: mod_base = OTHER; note = misc_feature - bicyclic nucleic acid scaffold modification
  source 1..22: mol_type = other RNA
cattcaactgttgcctccggtt

SEQ ID NO: 5787 - RNA, 22 nt, synthetic construct
  modified_base 22: mod_base = OTHER; note = thymine
  misc_feature 1..22: note = Antisense oligonucleotide
  modified_base 1: mod_base = OTHER; note = misc_feature - bicyclic nucleic acid scaffold modification
  modified_base 8: mod_base = OTHER; note = misc_feature - bicyclic nucleic acid scaffold modification
  modified_base 17: mod_base = OTHER; note = misc_feature - bicyclic nucleic acid scaffold modification
  modified_base 22: mod_base = OTHER; note = misc_feature - bicyclic nucleic acid scaffold modification
  source 1..22: mol_type = other RNA
cattcaactgttgcctccggtt

SEQ ID NO: 5788 - RNA, 22 nt, synthetic construct
  modified_base 21..22: mod_base = OTHER; note = thymine
  misc_feature 1..22: note = Antisense oligonucleotide
  modified_base 1: mod_base = OTHER; note = misc_feature - bicyclic nucleic acid scaffold modification
  modified_base 21..22: mod_base = OTHER; note = misc_feature - bicyclic nucleic acid scaffold modification
  source 1..22: mol_type = other RNA
cattcaactgttgcctccggtt

SEQ ID NO: 5789 - RNA, 22 nt, synthetic construct
  modified_base 21..22: mod_base = OTHER; note = thymine
  misc_feature 1..22: note = Antisense oligonucleotide
  modified_base 1..2: mod_base = OTHER; note = misc_feature - bicyclic nucleic acid scaffold modification
  modified_base 21..22: mod_base = OTHER; note = misc_feature - bicyclic nucleic acid scaffold modification
  source 1..22: mol_type = other RNA
cattcaactgttgcctccggtt

SEQ ID NO: 5790 - RNA, 22 nt, synthetic construct
  modified_base 21..22: mod_base = OTHER; note = thymine
  misc_feature 1..22: note = Antisense oligonucleotide
  modified_base 1: mod_base = OTHER; note = misc_feature - bicyclic nucleic acid scaffold modification
  modified_base 8: mod_base = OTHER; note = misc_feature - bicyclic nucleic acid scaffold modification
  modified_base 10: mod_base = OTHER; note = misc_feature - bicyclic nucleic acid scaffold modification
  modified_base 21..22: mod_base = OTHER; note = misc_feature - bicyclic nucleic acid scaffold modification
  source 1..22: mol_type = other RNA
cattcaactgttgcctccggtt

SEQ ID NO: 5791 - RNA, 22 nt, synthetic construct
  modified_base 21..22: mod_base = OTHER; note = thymine
  misc_feature 1..22: note = Antisense oligonucleotide
  modified_base 1: mod_base = OTHER; note = misc_feature - bicyclic nucleic acid scaffold modification
  modified_base 5: mod_base = OTHER; note = misc_feature - bicyclic nucleic acid scaffold modification
  modified_base 8: mod_base = OTHER; note = misc_feature - bicyclic nucleic acid scaffold modification
  modified_base 10: mod_base = OTHER; note = misc_feature - bicyclic nucleic acid scaffold modification
  modified_base 21..22: mod_base = OTHER; note = misc_feature - bicyclic nucleic acid scaffold modification
  source 1..22: mol_type = other RNA
cattcaactgttgcctccggtt

SEQ ID NO: 5792 - RNA, 22 nt, synthetic construct
  misc_feature 1..22: note = Antisense oligonucleotide
  modified_base 1: mod_base = OTHER; note = misc_feature - bicyclic nucleic acid scaffold modification
  modified_base 22: mod_base = OTHER; note = misc_feature - bicyclic nucleic acid scaffold modification
  source 1..22: mol_type = other RNA
attcaactgttgcctccggttc

SEQ ID NO: 5793 - RNA, 22 nt, synthetic construct
  misc_feature 1..22: note = Antisense oligonucleotide
  modified_base 1: mod_base = OTHER; note = misc_feature - bicyclic nucleic acid scaffold modification
  modified_base 19: mod_base = OTHER; note = misc_feature - bicyclic nucleic acid scaffold modification
  modified_base 22: mod_base = OTHER; note = misc_feature - bicyclic nucleic acid scaffold modification
  source 1..22: mol_type = other RNA
attcaactgttgcctccggttc

SEQ ID NO: 5794 - RNA, 22 nt, synthetic construct
  misc_feature 1..22: note = Antisense oligonucleotide
  modified_base 1: mod_base = OTHER; note = misc_feature - bicyclic nucleic acid scaffold modification
  modified_base 14: mod_base = OTHER; note = misc_feature - bicyclic nucleic acid scaffold modification
  modified_base 22: mod_base = OTHER; note = misc_feature - bicyclic nucleic acid scaffold modification
  source 1..22: mol_type = other RNA
attcaactgttgcctccggttc

SEQ ID NO: 5795 - RNA, 22 nt, synthetic construct
  misc_feature 1..22: note = Antisense oligonucleotide
  modified_base 1: mod_base = OTHER; note = misc_feature - bicyclic nucleic acid scaffold modification
  modified_base 9: mod_base = OTHER; note = misc_feature - bicyclic nucleic acid scaffold modification
  modified_base 22: mod_base = OTHER; note = misc_feature - bicyclic nucleic acid scaffold modification
  source 1..22: mol_type = other RNA
attcaactgttgcctccggttc

SEQ ID NO: 5796 - RNA, 22 nt, synthetic construct
  misc_feature 1..22: note = Antisense oligonucleotide
  modified_base 1: mod_base = OTHER; note = misc_feature - bicyclic nucleic acid scaffold modification
  modified_base 7: mod_base = OTHER; note = misc_feature - bicyclic nucleic acid scaffold modification
  modified_base 22: mod_base = OTHER; note = misc_feature - bicyclic nucleic acid scaffold modification
  source 1..22: mol_type = other RNA
attcaactgttgcctccggttc

SEQ ID NO: 5797 - RNA, 22 nt, synthetic construct
  misc_feature 1..22: note = Antisense oligonucleotide
  modified_base 1: mod_base = OTHER; note = misc_feature - bicyclic nucleic acid scaffold modification
  modified_base 4: mod_base = OTHER; note = misc_feature - bicyclic nucleic acid scaffold modification
  modified_base 22: mod_base = OTHER; note = misc_feature - bicyclic nucleic acid scaffold modification
  source 1..22: mol_type = other RNA
attcaactgttgcctccggttc

SEQ ID NO: 5798 - RNA, 22 nt, synthetic construct
  modified_base 2: mod_base = OTHER; note = thymine
  misc_feature 1..22: note = Antisense oligonucleotide
  modified_base 1..2: mod_base = OTHER; note = misc_feature - bicyclic nucleic acid scaffold modification
  modified_base 4: mod_base = OTHER; note = misc_feature - bicyclic nucleic acid scaffold modification
  modified_base 22: mod_base = OTHER; note = misc_feature - bicyclic nucleic acid scaffold modification
  source 1..22: mol_type = other RNA
attcaactgttgcctccggttc

SEQ ID NO: 5799 - RNA, 22 nt, synthetic construct
  misc_feature 1..22: note = Antisense oligonucleotide
  modified_base 1: mod_base = OTHER; note = misc_feature - bicyclic nucleic acid scaffold modification
  modified_base 4: mod_base = OTHER; note = misc_feature - bicyclic nucleic acid scaffold modification
  modified_base 7: mod_base = OTHER; note = misc_feature - bicyclic nucleic acid scaffold modification
  modified_base 22: mod_base = OTHER; note = misc_feature - bicyclic nucleic acid scaffold modification
  source 1..22: mol_type = other RNA
attcaactgttgcctccggttc

SEQ ID NO: 5800 - RNA, 22 nt, synthetic construct
  misc_feature 1..22: note = Antisense oligonucleotide
  modified_base 1: mod_base = OTHER; note = misc_feature - bicyclic nucleic acid scaffold modification
  modified_base 7: mod_base = OTHER; note = misc_feature - bicyclic nucleic acid scaffold modification
  modified_base 9: mod_base = OTHER; note = misc_feature - bicyclic nucleic acid scaffold modification
  modified_base 22: mod_base = OTHER; note = misc_feature - bicyclic nucleic acid scaffold modification
  source 1..22: mol_type = other RNA
attcaactgttgcctccggttc

SEQ ID NO: 5801 - RNA, 22 nt, synthetic construct
  misc_feature 1..22: note = Antisense oligonucleotide
  modified_base 1: mod_base = OTHER; note = misc_feature - bicyclic nucleic acid scaffold modification
  modified_base 4: mod_base = OTHER; note = misc_feature - bicyclic nucleic acid scaffold modification
  modified_base 9: mod_base = OTHER; note = misc_feature - bicyclic nucleic acid scaffold modification
  modified_base 22: mod_base = OTHER; note = misc_feature - bicyclic nucleic acid scaffold modification
  source 1..22: mol_type = other RNA
attcaactgttgcctccggttc

SEQ ID NO: 5802 - RNA, 22 nt, synthetic construct
  modified_base 21: mod_base = OTHER; note = thymine
  misc_feature 1..22: note = Antisense oligonucleotide
  modified_base 1: mod_base = OTHER; note = misc_feature - bicyclic nucleic acid scaffold modification
  modified_base 9: mod_base = OTHER; note = misc_feature - bicyclic nucleic acid scaffold modification
  modified_base 21..22: mod_base = OTHER; note = misc_feature - bicyclic nucleic acid scaffold modification
  source 1..22: mol_type = other RNA
attcaactgttgcctccggttc

SEQ ID NO: 5803 - RNA, 22 nt, synthetic construct
  misc_feature 1..22: note = Antisense oligonucleotide
  modified_base 1: mod_base = OTHER; note = misc_feature - bicyclic nucleic acid scaffold modification
  modified_base 12: mod_base = OTHER; note = misc_feature - bicyclic nucleic acid scaffold modification
  modified_base 19: mod_base = OTHER; note = misc_feature - bicyclic nucleic acid scaffold modification
  modified_base 22: mod_base = OTHER; note = misc_feature - bicyclic nucleic acid scaffold modification
  source 1..22: mol_type = other RNA
attcaactgttgcctccggttc

SEQ ID NO: 5804 - RNA, 22 nt, synthetic construct
  modified_base 2: mod_base = OTHER; note = thymine
  modified_base 21: mod_base = OTHER; note = thymine
  misc_feature 1..22: note = Antisense oligonucleotide
  modified_base 1..2: mod_base = OTHER; note = misc_feature - bicyclic nucleic acid scaffold modification
  modified_base 21..22: mod_base = OTHER; note = misc_feature - bicyclic nucleic acid scaffold modification
  source 1..22: mol_type = other RNA
attcaactgttgcctccggttc

SEQ ID NO: 5805 - RNA, 22 nt, synthetic construct
  modified_base 21: mod_base = OTHER; note = thymine
  misc_feature 1..22: note = Antisense oligonucleotide
  modified_base 1: mod_base = OTHER; note = misc_feature - bicyclic nucleic acid scaffold modification
  modified_base 4: mod_base = OTHER; note = misc_feature - bicyclic nucleic acid scaffold modification
  modified_base 9: mod_base = OTHER; note = misc_feature - bicyclic nucleic acid scaffold modification
  modified_base 21..22: mod_base = OTHER; note = misc_feature - bicyclic nucleic acid scaffold modification
  source 1..22: mol_type = other RNA
attcaactgttgcctccggttc

SEQ ID NO: 5806 - RNA, 22 nt, synthetic construct
  modified_base 1: mod_base = OTHER; note = thymine
  modified_base 22: mod_base = OTHER; note = thymine
  misc_feature 1..22: note = Antisense oligonucleotide
  modified_base 1: mod_base = OTHER; note = misc_feature - bicyclic nucleic acid scaffold modification
  modified_base 22: mod_base = OTHER; note = misc_feature - bicyclic nucleic acid scaffold modification
  source 1..22: mol_type = other RNA
ttcaactgttgcctccggttct

SEQ ID NO: 5807 - RNA, 22 nt, synthetic construct
  modified_base 1: mod_base = OTHER; note = thymine
  modified_base 22: mod_base = OTHER; note = thymine
  misc_feature 1..22: note = Antisense oligonucleotide
  modified_base 1: mod_base = OTHER; note = misc_feature - bicyclic nucleic acid scaffold modification
  modified_base 18: mod_base = OTHER; note = misc_feature - bicyclic nucleic acid scaffold modification
  modified_base 22: mod_base = OTHER; note = misc_feature - bicyclic nucleic acid scaffold modification
  source 1..22: mol_type = other RNA
ttcaactgttgcctccggttct

SEQ ID NO: 5808 - RNA, 22 nt, synthetic construct
  modified_base 1: mod_base = OTHER; note = thymine
  modified_base 22: mod_base = OTHER; note = thymine
  misc_feature 1..22: note = Antisense oligonucleotide
  modified_base 1: mod_base = OTHER; note = misc_feature - bicyclic nucleic acid scaffold modification
  modified_base 13: mod_base = OTHER; note = misc_feature - bicyclic nucleic acid scaffold modification
  modified_base 22: mod_base = OTHER; note = misc_feature - bicyclic nucleic acid scaffold modification
  source 1..22: mol_type = other RNA
ttcaactgttgcctccggttct

SEQ ID NO: 5809 - RNA, 22 nt, synthetic construct
  modified_base 1: mod_base = OTHER; note = thymine
  modified_base 22: mod_base = OTHER; note = thymine
  misc_feature 1..22: note = Antisense oligonucleotide
  modified_base 1: mod_base = OTHER; note = misc_feature - bicyclic nucleic acid scaffold modification
  modified_base 8: mod_base = OTHER; note = misc_feature - bicyclic nucleic acid scaffold modification
  modified_base 22: mod_base = OTHER; note = misc_feature - bicyclic nucleic acid scaffold modification
  source 1..22: mol_type = other RNA
ttcaactgttgcctccggttct

SEQ ID NO: 5810 - RNA, 22 nt, synthetic construct
  modified_base 1: mod_base = OTHER; note = thymine
  modified_base 22: mod_base = OTHER; note = thymine
  misc_feature 1..22: note = Antisense oligonucleotide
  modified_base 1: mod_base = OTHER; note = misc_feature - bicyclic nucleic acid scaffold modification
  modified_base 6: mod_base = OTHER; note = misc_feature - bicyclic nucleic acid scaffold modification
  modified_base 22: mod_base = OTHER; note = misc_feature - bicyclic nucleic acid scaffold modification
  source 1..22: mol_type = other RNA
ttcaactgttgcctccggttct

SEQ ID NO: 5811 - RNA, 22 nt, synthetic construct
  modified_base 1: mod_base = OTHER; note = thymine
  modified_base 22: mod_base = OTHER; note = thymine
  misc_feature 1..22: note = Antisense oligonucleotide
  modified_base 1: mod_base = OTHER; note = misc_feature - bicyclic nucleic acid scaffold modification
  modified_base 3: mod_base = OTHER; note = misc_feature - bicyclic nucleic acid scaffold modification
  modified_base 22: mod_base = OTHER; note = misc_feature - bicyclic nucleic acid scaffold modification
  source 1..22: mol_type = other RNA
ttcaactgttgcctccggttct

SEQ ID NO: 5812 - RNA, 22 nt, synthetic construct
  modified_base 1: mod_base = OTHER; note = thymine
  modified_base 22: mod_base = OTHER; note = thymine
  misc_feature 1..22: note = Antisense oligonucleotide
  modified_base 1: mod_base = OTHER; note = misc_feature - bicyclic nucleic acid scaffold modification
  modified_base 3: mod_base = OTHER; note = misc_feature - bicyclic nucleic acid scaffold modification
  modified_base 8: mod_base = OTHER; note = misc_feature - bicyclic nucleic acid scaffold modification
  modified_base 22: mod_base = OTHER; note = misc_feature - bicyclic nucleic acid scaffold modification
  source 1..22: mol_type = other RNA
ttcaactgttgcctccggttct

SEQ ID NO: 5813 - RNA, 22 nt, synthetic construct
  modified_base 1: mod_base = OTHER; note = thymine
  modified_base 22: mod_base = OTHER; note = thymine
  misc_feature 1..22: note = Antisense oligonucleotide
  modified_base 1: mod_base = OTHER; note = misc_feature - bicyclic nucleic acid scaffold modification
  modified_base 6: mod_base = OTHER; note = misc_feature - bicyclic nucleic acid scaffold modification
  modified_base 13: mod_base = OTHER; note = misc_feature - bicyclic nucleic acid scaffold modification
  modified_base 22: mod_base = OTHER; note = misc_feature - bicyclic nucleic acid scaffold modification
  source 1..22: mol_type = other RNA
ttcaactgttgcctccggttct

SEQ ID NO: 5814 - RNA, 22 nt, synthetic construct
  modified_base 1: mod_base = OTHER; note = thymine
  modified_base 22: mod_base = OTHER; note = thymine
  misc_feature 1..22: note = Antisense oligonucleotide
  modified_base 1: mod_base = OTHER; note = misc_feature - bicyclic nucleic acid scaffold modification
  modified_base 8: mod_base = OTHER; note = misc_feature - bicyclic nucleic acid scaffold modification
  modified_base 21..22: mod_base = OTHER; note = misc_feature - bicyclic nucleic acid scaffold modification
  source 1..22: mol_type = other RNA
ttcaactgttgcctccggttct

SEQ ID NO: 5815 - RNA, 22 nt, synthetic construct
  modified_base 1: mod_base = OTHER; note = thymine
  modified_base 22: mod_base = OTHER; note = thymine
  misc_feature 1..22: note = Antisense oligonucleotide
  modified_base 1: mod_base = OTHER; note = misc_feature - bicyclic nucleic acid scaffold modification
  modified_base 3: mod_base = OTHER; note = misc_feature - bicyclic nucleic acid scaffold modification
  modified_base 8: mod_base = OTHER; note = misc_feature - bicyclic nucleic acid scaffold modification
  modified_base 21..22: mod_base = OTHER; note = misc_feature - bicyclic nucleic acid scaffold modification
  source 1..22: mol_type = other RNA
ttcaactgttgcctccggttct

SEQ ID NO: 5816 - RNA, 22 nt, synthetic construct
  modified_base 1..2: mod_base = OTHER; note = thymine
  modified_base 22: mod_base = OTHER; note = thymine
  misc_feature 1..22: note = Antisense oligonucleotide
  modified_base 1..2: mod_base = OTHER; note = misc_feature - bicyclic nucleic acid scaffold modification
  modified_base 21..22: mod_base = OTHER; note = misc_feature - bicyclic nucleic acid scaffold modification
  source 1..22: mol_type = other RNA
ttcaactgttgcctccggttct

SEQ ID NO: 5817 - RNA, 22 nt, synthetic construct
  modified_base 1: mod_base = OTHER; note = thymine
  modified_base 22: mod_base = OTHER; note = thymine
  misc_feature 1..22: note = Antisense oligonucleotide
  modified_base 1: mod_base = OTHER; note = misc_feature - bicyclic nucleic acid scaffold modification
  modified_base 6: mod_base = OTHER; note = misc_feature - bicyclic nucleic acid scaffold modification
  modified_base 21..22: mod_base = OTHER; note = misc_feature - bicyclic nucleic acid scaffold modification
  source 1..22: mol_type = other RNA
ttcaactgttgcctccggttct

SEQ ID NO: 5818 - RNA, 22 nt, synthetic construct
  modified_base 1: mod_base = OTHER; note = thymine
  modified_base 22: mod_base = OTHER; note = thymine
  misc_feature 1..22: note = Antisense oligonucleotide
  modified_base 1: mod_base = OTHER; note = misc_feature - bicyclic nucleic acid scaffold modification
  modified_base 8: mod_base = OTHER; note = misc_feature - bicyclic nucleic acid scaffold modification
  modified_base 11: mod_base = OTHER; note = misc_feature - bicyclic nucleic acid scaffold modification
  modified_base 21..22: mod_base = OTHER; note = misc_feature - bicyclic nucleic acid scaffold modification
  source 1..22: mol_type = other RNA
ttcaactgttgcctccggttct

SEQ ID NO: 5819 - RNA, 20 nt, synthetic construct
  misc_feature 1..20: note = Antisense oligonucleotide
  modified_base 1: mod_base = OTHER; note = misc_feature - bicyclic nucleic acid scaffold modification
  modified_base 20: mod_base = OTHER; note = misc_feature - bicyclic nucleic acid scaffold modification
  source 1..20: mol_type = other RNA
cattcaactgttgcctccgg

SEQ ID NO: 5820 - RNA, 20 nt, synthetic construct
  misc_feature 1..20: note = Antisense oligonucleotide
  modified_base 1: mod_base = OTHER; note = misc_feature - bicyclic nucleic acid scaffold modification
  modified_base 15: mod_base = OTHER; note = misc_feature - bicyclic nucleic acid scaffold modification
  modified_base 20: mod_base = OTHER; note = misc_feature - bicyclic nucleic acid scaffold modification
  source 1..20: mol_type = other RNA
cattcaactgttgcctccgg

SEQ ID NO: 5821 - RNA, 20 nt, synthetic construct
  misc_feature 1..20: note = Antisense oligonucleotide
  modified_base 1: mod_base = OTHER; note = misc_feature - bicyclic nucleic acid scaffold modification
  modified_base 10: mod_base = OTHER; note = misc_feature - bicyclic nucleic acid scaffold modification
  modified_base 20: mod_base = OTHER; note = misc_feature - bicyclic nucleic acid scaffold modification
  source 1..20: mol_type = other RNA
cattcaactgttgcctccgg

SEQ ID NO: 5822 - RNA, 20 nt, synthetic construct
  misc_feature 1..20: note = Antisense oligonucleotide
  modified_base 1: mod_base = OTHER; note = misc_feature - bicyclic nucleic acid scaffold modification
  modified_base 8: mod_base = OTHER; note = misc_feature - bicyclic nucleic acid scaffold modification
  modified_base 20: mod_base = OTHER; note = misc_feature - bicyclic nucleic acid scaffold modification
  source 1..20: mol_type = other RNA
cattcaactgttgcctccgg

SEQ ID NO: 5823 - RNA, 20 nt, synthetic construct
  misc_feature 1..20: note = Antisense oligonucleotide
  modified_base 1: mod_base = OTHER; note = misc_feature - bicyclic nucleic acid scaffold modification
  modified_base 5: mod_base = OTHER; note = misc_feature - bicyclic nucleic acid scaffold modification
  modified_base 20: mod_base = OTHER; note = misc_feature - bicyclic nucleic acid scaffold modification
  source 1..20: mol_type = other RNA
cattcaactgttgcctccgg

SEQ ID NO: 5824 - RNA, 20 nt, synthetic construct
  misc_feature 1..20: note = Antisense oligonucleotide
  modified_base 1: mod_base = OTHER; note = misc_feature - bicyclic nucleic acid scaffold modification
  modified_base 5: mod_base = OTHER; note = misc_feature - bicyclic nucleic acid scaffold modification
  modified_base 10: mod_base = OTHER; note = misc_feature - bicyclic nucleic acid scaffold modification
  modified_base 20: mod_base = OTHER; note = misc_feature - bicyclic nucleic acid scaffold modification
  source 1..20: mol_type = other RNA
cattcaactgttgcctccgg

SEQ ID NO: 5825 - RNA, 20 nt, synthetic construct
  misc_feature 1..20: note = Antisense oligonucleotide
  modified_base 1: mod_base = OTHER; note = misc_feature - bicyclic nucleic acid scaffold modification
  modified_base 8: mod_base = OTHER; note = misc_feature - bicyclic nucleic acid scaffold modification
  modified_base 13: mod_base = OTHER; note = misc_feature - bicyclic nucleic acid scaffold modification
  modified_base 20: mod_base = OTHER; note = misc_feature - bicyclic nucleic acid scaffold modification
  source 1..20: mol_type = other RNA
cattcaactgttgcctccgg

SEQ ID NO: 5826 - RNA, 20 nt, synthetic construct
  misc_feature 1..20: note = Antisense oligonucleotide
  modified_base 1: mod_base = OTHER; note = misc_feature - bicyclic nucleic acid scaffold modification
  modified_base 10: mod_base = OTHER; note = misc_feature - bicyclic nucleic acid scaffold modification
  modified_base 13: mod_base = OTHER; note = misc_feature - bicyclic nucleic acid scaffold modification
  modified_base 20: mod_base = OTHER; note = misc_feature - bicyclic nucleic acid scaffold modification
  source 1..20: mol_type = other RNA
cattcaactgttgcctccgg

SEQ ID NO: 5827 - RNA, 20 nt, synthetic construct
  misc_feature 1..20: note = Antisense oligonucleotide
  modified_base 1: mod_base = OTHER; note = misc_feature - bicyclic nucleic acid scaffold modification
  modified_base 19..20: mod_base = OTHER; note = misc_feature - bicyclic nucleic acid scaffold modification
  source 1..20: mol_type = other RNA
cattcaactgttgcctccgg

SEQ ID NO: 5828 - RNA, 20 nt, synthetic construct
  misc_feature 1..20: note = Antisense oligonucleotide
  modified_base 1..2: mod_base = OTHER; note = misc_feature - bicyclic nucleic acid scaffold modification
  modified_base 19..20: mod_base = OTHER; note = misc_feature - bicyclic nucleic acid scaffold modification
  source 1..20: mol_type = other RNA
cattcaactgttgcctccgg

SEQ ID NO: 5829 - RNA, 20 nt, synthetic construct
  misc_feature 1..20: note = Antisense oligonucleotide
  modified_base 1..2: mod_base = OTHER; note = misc_feature - bicyclic nucleic acid scaffold modification
  modified_base 8: mod_base = OTHER; note = misc_feature - bicyclic nucleic acid scaffold modification
  modified_base 10: mod_base = OTHER; note = misc_feature - bicyclic nucleic acid scaffold modification
  modified_base 20: mod_base = OTHER; note = misc_feature - bicyclic nucleic acid scaffold modification
  source 1..20: mol_type = other RNA
cattcaactgttgcctccgg

SEQ ID NO: 5830 - RNA, 20 nt, synthetic construct
  modified_base 20: mod_base = OTHER; note = thymine
  misc_feature 1..20: note = Antisense oligonucleotide
  modified_base 1: mod_base = OTHER; note = misc_feature - bicyclic nucleic acid scaffold modification
  modified_base 20: mod_base = OTHER; note = misc_feature - bicyclic nucleic acid scaffold modification
  source 1..20: mol_type = other RNA
attcaactgttgcctccggt

SEQ ID NO: 5831 - RNA, 20 nt, synthetic construct
  modified_base 20: mod_base = OTHER; note = thymine
  misc_feature 1..20: note = Antisense oligonucleotide
  modified_base 1: mod_base = OTHER; note = misc_feature - bicyclic nucleic acid scaffold modification
  modified_base 4: mod_base = OTHER; note = misc_feature - bicyclic nucleic acid scaffold modification
  modified_base 20: mod_base = OTHER; note = misc_feature - bicyclic nucleic acid scaffold modification
  source 1..20: mol_type = other RNA
attcaactgttgcctccggt

SEQ ID NO: 5832 - RNA, 20 nt, synthetic construct
  modified_base 20: mod_base = OTHER; note = thymine
  misc_feature 1..20: note = Antisense oligonucleotide
  modified_base 1: mod_base = OTHER; note = misc_feature - bicyclic nucleic acid scaffold modification
  modified_base 7: mod_base = OTHER; note = misc_feature - bicyclic nucleic acid scaffold modification
  modified_base 20: mod_base = OTHER; note = misc_feature - bicyclic nucleic acid scaffold modification
  source 1..20: mol_type = other RNA
attcaactgttgcctccggt

SEQ ID NO: 5833 - RNA, 20 nt, synthetic construct
  modified_base 20: mod_base = OTHER; note = thymine
  misc_feature 1..20: note = Antisense oligonucleotide
  modified_base 1: mod_base = OTHER; note = misc_feature - bicyclic nucleic acid scaffold modification
  modified_base 9: mod_base = OTHER; note = misc_feature - bicyclic nucleic acid scaffold modification
  modified_base 20: mod_base = OTHER; note = misc_feature - bicyclic nucleic acid scaffold modification
  source 1..20: mol_type = other RNA
attcaactgttgcctccggt

SEQ ID NO: 5834 - RNA, 20 nt, synthetic construct
  modified_base 20: mod_base = OTHER; note = thymine
  misc_feature 1..20: note = Antisense oligonucleotide
  modified_base 1: mod_base = OTHER; note = misc_feature - bicyclic nucleic acid scaffold modification
  modified_base 12: mod_base = OTHER; note = misc_feature - bicyclic nucleic acid scaffold modification
  modified_base 20: mod_base = OTHER; note = misc_feature - bicyclic nucleic acid scaffold modification
  source 1..20: mol_type = other RNA
attcaactgttgcctccggt

SEQ ID NO: 5835 - RNA, 20 nt, synthetic construct
  modified_base 20: mod_base = OTHER; note = thymine
  misc_feature 1..20: note = Antisense oligonucleotide
  modified_base 1: mod_base = OTHER; note = misc_feature - bicyclic nucleic acid scaffold modification
  modified_base 7: mod_base = OTHER; note = misc_feature - bicyclic nucleic acid scaffold modification
  modified_base 12: mod_base = OTHER; note = misc_feature - bicyclic nucleic acid scaffold modification
  modified_base 20: mod_base = OTHER; note = misc_feature - bicyclic nucleic acid scaffold modification
  source 1..20: mol_type = other RNA
attcaactgttgcctccggt

SEQ ID NO: 5836 - RNA, 20 nt, synthetic construct
  modified_base 20: mod_base = OTHER; note = thymine
  misc_feature 1..20: note = Antisense oligonucleotide
  modified_base 1: mod_base = OTHER; note = misc_feature - bicyclic nucleic acid scaffold modification
  modified_base 4: mod_base = OTHER; note = misc_feature - bicyclic nucleic acid scaffold modification
  modified_base 9: mod_base = OTHER; note = misc_feature - bicyclic nucleic acid scaffold modification
  modified_base 20: mod_base = OTHER; note = misc_feature - bicyclic nucleic acid scaffold modification
  source 1..20: mol_type = other RNA
attcaactgttgcctccggt

SEQ ID NO: 5837 - RNA, 20 nt, synthetic construct
  modified_base 20: mod_base = OTHER; note = thymine
  misc_feature 1..20: note = Antisense oligonucleotide
  modified_base 1: mod_base = OTHER; note = misc_feature - bicyclic nucleic acid scaffold modification
  modified_base 4: mod_base = OTHER; note = misc_feature - bicyclic nucleic acid scaffold modification
  modified_base 9: mod_base = OTHER; note = misc_feature - bicyclic nucleic acid scaffold modification
  modified_base 12: mod_base = OTHER; note = misc_feature - bicyclic nucleic acid scaffold modification
  modified_base 20: mod_base = OTHER; note = misc_feature - bicyclic nucleic acid scaffold modification
  source 1..20: mol_type = other RNA
attcaactgttgcctccggt

SEQ ID NO: 5838 - RNA, 20 nt, synthetic construct
  modified_base 20: mod_base = OTHER; note = thymine
  misc_feature 1..20: note = Antisense oligonucleotide
  modified_base 1: mod_base = OTHER; note = misc_feature - bicyclic nucleic acid scaffold modification
  modified_base 19..20: mod_base = OTHER; note = misc_feature - bicyclic nucleic acid scaffold modification
  source 1..20: mol_type = other RNA
attcaactgttgcctccggt

SEQ ID NO: 5839 - RNA, 20 nt, synthetic construct
  modified_base 2: mod_base = OTHER; note = thymine
  modified_base 20: mod_base = OTHER; note = thymine
  misc_feature 1..20: note = Antisense oligonucleotide
  modified_base 1..2: mod_base = OTHER; note = misc_feature - bicyclic nucleic acid scaffold modification
  modified_base 19..20: mod_base = OTHER; note = misc_feature - bicyclic nucleic acid scaffold modification
  source 1..20: mol_type = other RNA
attcaactgttgcctccggt

SEQ ID NO: 5840 - RNA, 20 nt, synthetic construct
  modified_base 2: mod_base = OTHER; note = thymine
  modified_base 20: mod_base = OTHER; note = thymine
  misc_feature 1..20: note = Antisense oligonucleotide
  modified_base 1..2: mod_base = OTHER; note = misc_feature - bicyclic nucleic acid scaffold modification
  modified_base 9: mod_base = OTHER; note = misc_feature - bicyclic nucleic acid scaffold modification
  modified_base 19..20: mod_base = OTHER; note = misc_feature - bicyclic nucleic acid scaffold modification
  source 1..20: mol_type = other RNA
attcaactgttgcctccggt

SEQ ID NO: 5841 - RNA, 20 nt, synthetic construct
  modified_base 1: mod_base = OTHER; note = thymine
  modified_base 20: mod_base = OTHER; note = thymine
  misc_feature 1..20: note = Antisense oligonucleotide
  modified_base 1: mod_base = OTHER; note = misc_feature - bicyclic nucleic acid scaffold modification
  modified_base 20: mod_base = OTHER; note = misc_feature - bicyclic nucleic acid scaffold modification
  source 1..20: mol_type = other RNA
ttcaactgttgcctccggtt

SEQ ID NO: 5842 - RNA, 20 nt, synthetic construct
  modified_base 1: mod_base = OTHER; note = thymine
  modified_base 20: mod_base = OTHER; note = thymine
  misc_feature 1..20: note = Antisense oligonucleotide
  modified_base 1: mod_base = OTHER; note = misc_feature - bicyclic nucleic acid scaffold modification
  modified_base 3: mod_base = OTHER; note = misc_feature - bicyclic nucleic acid scaffold modification
  modified_base 20: mod_base = OTHER; note = misc_feature - bicyclic nucleic acid scaffold modification
  source 1..20: mol_type = other RNA
ttcaactgttgcctccggtt

SEQ ID NO: 5843 - RNA, 20 nt, synthetic construct
  modified_base 1: mod_base = OTHER; note = thymine
  modified_base 20: mod_base = OTHER; note = thymine
  misc_feature 1..20: note = Antisense oligonucleotide
  modified_base 1: mod_base = OTHER; note = misc_feature - bicyclic nucleic acid scaffold modification
  modified_base 6: mod_base = OTHER; note = misc_feature - bicyclic nucleic acid scaffold modification
  modified_base 20: mod_base = OTHER; note = misc_feature - bicyclic nucleic acid scaffold modification
  source 1..20: mol_type = other RNA
ttcaactgttgcctccggtt

SEQ ID NO: 5844 - RNA, 20 nt, synthetic construct
  modified_base 1: mod_base = OTHER; note = thymine
  modified_base 20: mod_base = OTHER; note = thymine
  misc_feature 1..20: note = Antisense oligonucleotide
  modified_base 1: mod_base = OTHER; note = misc_feature - bicyclic nucleic acid scaffold modification
  modified_base 8: mod_base = OTHER; note = misc_feature - bicyclic nucleic acid scaffold modification
  modified_base 20: mod_base = OTHER; note = misc_feature - bicyclic nucleic acid scaffold modification
  source 1..20: mol_type = other RNA
ttcaactgttgcctccggtt

SEQ ID NO: 5845 - RNA, 20 nt, synthetic construct
  modified_base 1: mod_base = OTHER; note = thymine
  modified_base 20: mod_base = OTHER; note = thymine
  misc_feature 1..20: note = Antisense oligonucleotide
  modified_base 1: mod_base = OTHER; note = misc_feature - bicyclic nucleic acid scaffold modification
  modified_base 11: mod_base = OTHER; note = misc_feature - bicyclic nucleic acid scaffold modification
  modified_base 20: mod_base = OTHER; note = misc_feature - bicyclic nucleic acid scaffold modification
  source 1..20: mol_type = other RNA
ttcaactgttgcctccggtt

SEQ ID NO: 5846 - RNA, 20 nt, synthetic construct
  modified_base 1: mod_base = OTHER; note = thymine
  modified_base 20: mod_base = OTHER; note = thymine
  misc_feature 1..20: note = Antisense oligonucleotide
  modified_base 1: mod_base = OTHER; note = misc_feature - bicyclic nucleic acid scaffold modification
  modified_base 18: mod_base = OTHER; note = misc_feature - bicyclic nucleic acid scaffold modification
  modified_base 20: mod_base = OTHER; note = misc_feature - bicyclic nucleic acid scaffold modification
  source 1..20: mol_type = other RNA
ttcaactgttgcctccggtt

SEQ ID NO: 5847 - RNA, 20 nt, synthetic construct
  modified_base 1: mod_base = OTHER; note = thymine
  modified_base 20: mod_base = OTHER; note = thymine
  misc_feature 1..20: note = Antisense oligonucleotide
  modified_base 1: mod_base = OTHER; note = misc_feature - bicyclic nucleic acid scaffold modification
  modified_base 3: mod_base = OTHER; note = misc_feature - bicyclic nucleic acid scaffold modification
  modified_base 8: mod_base = OTHER; note = misc_feature - bicyclic nucleic acid scaffold modification
  modified_base 20: mod_base = OTHER; note = misc_feature - bicyclic nucleic acid scaffold modification
  source 1..20: mol_type = other RNA
ttcaactgttgcctccggtt

SEQ ID NO: 5848 - RNA, 20 nt, synthetic construct
  modified_base 1: mod_base = OTHER; note = thymine
  modified_base 20: mod_base = OTHER; note = thymine
  misc_feature 1..20: note = Antisense oligonucleotide
  modified_base 1: mod_base = OTHER; note = misc_feature - bicyclic nucleic acid scaffold modification
  modified_base 6: mod_base = OTHER; note = misc_feature - bicyclic nucleic acid scaffold modification
  modified_base 11: mod_base = OTHER; note = misc_feature - bicyclic nucleic acid scaffold modification
  modified_base 20: mod_base = OTHER; note = misc_feature - bicyclic nucleic acid scaffold modification
  source 1..20: mol_type = other RNA
ttcaactgttgcctccggtt

SEQ ID NO: 5849 - RNA, 20 nt, synthetic construct
  modified_base 1: mod_base = OTHER; note = thymine
  modified_base 19..20: mod_base = OTHER; note = thymine
  misc_feature 1..20: note = Antisense oligonucleotide
  modified_base 1: mod_base = OTHER; note = misc_feature - bicyclic nucleic acid scaffold modification
  modified_base 19..20: mod_base = OTHER; note = misc_feature - bicyclic nucleic acid scaffold modification
  source 1..20: mol_type = other RNA
ttcaactgttgcctccggtt

SEQ ID NO: 5850 - RNA, 20 nt, synthetic construct
  modified_base 1..2: mod_base = OTHER; note = thymine
  modified_base 19..20: mod_base = OTHER; note = thymine
  misc_feature 1..20: note = Antisense oligonucleotide
  modified_base 1..2: mod_base = OTHER; note = misc_feature - bicyclic nucleic acid scaffold modification
  modified_base 19..20: mod_base = OTHER; note = misc_feature - bicyclic nucleic acid scaffold modification
  source 1..20: mol_type = other RNA
ttcaactgttgcctccggtt

SEQ ID NO: 5851 - RNA, 20 nt, synthetic construct
  modified_base 1..2: mod_base = OTHER; note = thymine
  modified_base 19..20: mod_base = OTHER; note = thymine
  misc_feature 1..20: note = Antisense oligonucleotide
  modified_base 1..2: mod_base = OTHER; note = misc_feature - bicyclic nucleic acid scaffold modification
  modified_base 8: mod_base = OTHER; note = misc_feature - bicyclic nucleic acid scaffold modification
  modified_base 19..20: mod_base = OTHER; note = misc_feature - bicyclic nucleic acid scaffold modification
  source 1..20: mol_type = other RNA
ttcaactgttgcctccggtt

SEQ ID NO: 5852 - RNA, 20 nt, synthetic construct
  modified_base 1: mod_base = OTHER; note = thymine
  modified_base 19..20: mod_base = OTHER; note = thymine
  misc_feature 1..20: note = Antisense oligonucleotide
  modified_base 1: mod_base = OTHER; note = misc_feature - bicyclic nucleic acid scaffold modification
  modified_base 3: mod_base = OTHER; note = misc_feature - bicyclic nucleic acid scaffold modification
  modified_base 8: mod_base = OTHER; note = misc_feature - bicyclic nucleic acid scaffold modification
  modified_base 19..20: mod_base = OTHER; note = misc_feature - bicyclic nucleic acid scaffold modification
  source 1..20: mol_type = other RNA
ttcaactgttgcctccggtt

SEQ ID NO: 5853 - RNA, 20 nt, synthetic construct
  modified_base 1: mod_base = OTHER; note = thymine
  modified_base 20: mod_base = OTHER; note = thymine
  misc_feature 1..20: note = Antisense oligonucleotide
  modified_base 1: mod_base = OTHER; note = misc_feature - bicyclic nucleic acid scaffold modification
  modified_base 17: mod_base = OTHER; note = misc_feature - bicyclic nucleic acid scaffold modification
  modified_base 20: mod_base = OTHER; note = misc_feature - bicyclic nucleic acid scaffold modification
  source 1..20: mol_type = other RNA
ttcaactgttgcctccggtt

SEQ ID NO: 5854 - RNA, 20 nt, synthetic construct
  modified_base 1: mod_base = OTHER; note = thymine
  modified_base 20: mod_base = OTHER; note = thymine
  misc_feature 1..20: note = Antisense oligonucleotide
  modified_base 1: mod_base = OTHER; note = misc_feature - bicyclic nucleic acid scaffold modification
  modified_base 12: mod_base = OTHER; note = misc_feature - bicyclic nucleic acid scaffold modification
  modified_base 20: mod_base = OTHER; note = misc_feature - bicyclic nucleic acid scaffold modification
  source 1..20: mol_type = other RNA
ttcaactgttgcctccggtt

SEQ ID NO: 5855 - RNA, 20 nt, synthetic construct
  modified_base 1: mod_base = OTHER; note = thymine
  misc_feature 1..20: note = Antisense oligonucleotide
  modified_base 1: mod_base = OTHER; note = misc_feature - bicyclic nucleic acid scaffold modification
  modified_base 20: mod_base = OTHER; note = misc_feature - bicyclic nucleic acid scaffold modification
  source 1..20: mol_type = other RNA
tcaactgttgcctccggttc

SEQ ID NO: 5856 - RNA, 20 nt, synthetic construct
  modified_base 1: mod_base = OTHER; note = thymine
  misc_feature 1..20: note = Antisense oligonucleotide
  modified_base 1..2: mod_base = OTHER; note = misc_feature - bicyclic nucleic acid scaffold modification
  modified_base 20: mod_base = OTHER; note = misc_feature - bicyclic nucleic acid scaffold modification
  source 1..20: mol_type = other RNA
tcaactgttgcctccggttc

SEQ ID NO: 5857 - RNA, 20 nt, synthetic construct
  modified_base 1: mod_base = OTHER; note = thymine
  misc_feature 1..20: note = Antisense oligonucleotide
  modified_base 1: mod_base = OTHER; note = misc_feature - bicyclic nucleic acid scaffold modification
  modified_base 5: mod_base = OTHER; note = misc_feature - bicyclic nucleic acid scaffold modification
  modified_base 20: mod_base = OTHER; note = misc_feature - bicyclic nucleic acid scaffold modification
  source 1..20: mol_type = other RNA
tcaactgttgcctccggttc

SEQ ID NO: 5858 - RNA, 20 nt, synthetic construct
  modified_base 1: mod_base = OTHER; note = thymine
  misc_feature 1..20: note = Antisense oligonucleotide
  modified_base 1: mod_base = OTHER; note = misc_feature - bicyclic nucleic acid scaffold modification
  modified_base 7: mod_base = OTHER; note = misc_feature - bicyclic nucleic acid scaffold modification
  modified_base 20: mod_base = OTHER; note = misc_feature - bicyclic nucleic acid scaffold modification
  source 1..20: mol_type = other RNA
tcaactgttgcctccggttc

SEQ ID NO: 5859 - RNA, 20 nt, synthetic construct
  modified_base 1: mod_base = OTHER; note = thymine
  misc_feature 1..20: note = Antisense oligonucleotide
  modified_base 1: mod_base = OTHER; note = misc_feature - bicyclic nucleic acid scaffold modification
  modified_base 10: mod_base = OTHER; note = misc_feature - bicyclic nucleic acid scaffold modification
  modified_base 20: mod_base = OTHER; note = misc_feature - bicyclic nucleic acid scaffold modification
  source 1..20: mol_type = other RNA
tcaactgttgcctccggttc

SEQ ID NO: 5860 - RNA, 20 nt, synthetic construct
  modified_base 1: mod_base = OTHER; note = thymine
  misc_feature 1..20: note = Antisense oligonucleotide
  modified_base 1: mod_base = OTHER; note = misc_feature - bicyclic nucleic acid scaffold modification
  modified_base 14: mod_base = OTHER; note = misc_feature - bicyclic nucleic acid scaffold modification
  modified_base 20: mod_base = OTHER; note = misc_feature - bicyclic nucleic acid scaffold modification
  source 1..20: mol_type = other RNA
tcaactgttgcctccggttc

SEQ ID NO: 5861 - RNA, 20 nt, synthetic construct
  modified_base 1: mod_base = OTHER; note = thymine
  misc_feature 1..20: note = Antisense oligonucleotide
  modified_base 1: mod_base = OTHER; note = misc_feature - bicyclic nucleic acid scaffold modification
  modified_base 17: mod_base = OTHER; note = misc_feature - bicyclic nucleic acid scaffold modification
  modified_base 20: mod_base = OTHER; note = misc_feature - bicyclic nucleic acid scaffold modification
  source 1..20: mol_type = other RNA
tcaactgttgcctccggttc

SEQ ID NO: 5862 - RNA, 20 nt, synthetic construct
  modified_base 1: mod_base = OTHER; note = thymine
  modified_base 19: mod_base = OTHER; note = thymine
  misc_feature 1..20: note = Antisense oligonucleotide
  modified_base 1: mod_base = OTHER; note = misc_feature - bicyclic nucleic acid scaffold modification
  modified_base 19..20: mod_base = OTHER; note = misc_feature - bicyclic nucleic acid scaffold modification
  source 1..20: mol_type = other RNA
tcaactgttgcctccggttc

SEQ ID NO: 5863 - RNA, 20 nt, synthetic construct
  modified_base 1: mod_base = OTHER; note = thymine
  misc_feature 1..20: note = Antisense oligonucleotide
  modified_base 1..2: mod_base = OTHER; note = misc_feature - bicyclic nucleic acid scaffold modification
  modified_base 7: mod_base = OTHER; note = misc_feature - bicyclic nucleic acid scaffold modification
  modified_base 20: mod_base = OTHER; note = misc_feature - bicyclic nucleic acid scaffold modification
  source 1..20: mol_type = other RNA
tcaactgttgcctccggttc

SEQ ID NO: 5864 - RNA, 20 nt, synthetic construct
  modified_base 1: mod_base = OTHER; note = thymine
  misc_feature 1..20: note = Antisense oligonucleotide
  modified_base 1: mod_base = OTHER; note = misc_feature - bicyclic nucleic acid scaffold modification
  modified_base 6: mod_base = OTHER; note = misc_feature - bicyclic nucleic acid scaffold modification
  modified_base 10: mod_base = OTHER; note = misc_feature - bicyclic nucleic acid scaffold modification
  modified_base 20: mod_base = OTHER; note = misc_feature - bicyclic nucleic acid scaffold modification
  source 1..20: mol_type = other RNA
tcaactgttgcctccggttc

SEQ ID NO: 5865 - RNA, 20 nt, synthetic construct
  modified_base 1: mod_base = OTHER; note = thymine
  misc_feature 1..20: note = Antisense oligonucleotide
  modified_base 1: mod_base = OTHER; note = misc_feature - bicyclic nucleic acid scaffold modification
  modified_base 5: mod_base = OTHER; note = misc_feature - bicyclic nucleic acid scaffold modification
  modified_base 10: mod_base = OTHER; note = misc_feature - bicyclic nucleic acid scaffold modification
  modified_base 20: mod_base = OTHER; note = misc_feature - bicyclic nucleic acid scaffold modification
  source 1..20: mol_type = other RNA
tcaactgttgcctccggttc

SEQ ID NO: 5866 - RNA, 20 nt, synthetic construct
  modified_base 1: mod_base = OTHER; note = thymine
  misc_feature 1..20: note = Antisense oligonucleotide
  modified_base 1: mod_base = OTHER; note = misc_feature - bicyclic nucleic acid scaffold modification
  modified_base 7: mod_base = OTHER; note = misc_feature - bicyclic nucleic acid scaffold modification
  modified_base 17: mod_base = OTHER; note = misc_feature - bicyclic nucleic acid scaffold modification
  modified_base 20: mod_base = OTHER; note = misc_feature - bicyclic nucleic acid scaffold modification
  source 1..20: mol_type = other RNA
tcaactgttgcctccggttc

SEQ ID NO: 5867 - RNA, 20 nt, synthetic construct
  modified_base 1: mod_base = OTHER; note = thymine
  modified_base 19: mod_base = OTHER; note = thymine
  misc_feature 1..20: note = Antisense oligonucleotide
  modified_base 1..2: mod_base = OTHER; note = misc_feature - bicyclic nucleic acid scaffold modification
  modified_base 7: mod_base = OTHER; note = misc_feature - bicyclic nucleic acid scaffold modification
  modified_base 19..20: mod_base = OTHER; note = misc_feature - bicyclic nucleic acid scaffold modification
  source 1..20: mol_type = other RNA
tcaactgttgcctccggttc

SEQ ID NO: 5868 - RNA, 20 nt, synthetic construct
  modified_base 1: mod_base = OTHER; note = thymine
  modified_base 19: mod_base = OTHER; note = thymine
  misc_feature 1..20: note = Antisense oligonucleotide
  modified_base 1..2: mod_base = OTHER; note = misc_feature - bicyclic nucleic acid scaffold modification
  modified_base 5: mod_base = OTHER; note = misc_feature - bicyclic nucleic acid scaffold modification
  modified_base 19..20: mod_base = OTHER; note = misc_feature - bicyclic nucleic acid scaffold modification
  source 1..20: mol_type = other RNA
tcaactgttgcctccggttc

SEQ ID NO: 5869 - RNA, 20 nt, synthetic construct
  modified_base 20: mod_base = OTHER; note = thymine
  misc_feature 1..20: note = Antisense oligonucleotide
  modified_base 1: mod_base = OTHER; note = misc_feature - bicyclic nucleic acid scaffold modification
  modified_base 20: mod_base = OTHER; note = misc_feature - bicyclic nucleic acid scaffold modification
  source 1..20: mol_type = other RNA
caactgttgcctccggttct

SEQ ID NO: 5870 - RNA, 20 nt, synthetic construct
  modified_base 20: mod_base = OTHER; note = thymine
  misc_feature 1..20: note = Antisense oligonucleotide
  modified_base 1: mod_base = OTHER; note = misc_feature - bicyclic nucleic acid scaffold modification
  modified_base 4: mod_base = OTHER; note = misc_feature - bicyclic nucleic acid scaffold modification
  modified_base 20: mod_base = OTHER; note = misc_feature - bicyclic nucleic acid scaffold modification
  source 1..20: mol_type = other RNA
caactgttgcctccggttct

SEQ ID NO: 5871 - RNA, 20 nt, synthetic construct
  modified_base 20: mod_base = OTHER; note = thymine
  misc_feature 1..20: note = Antisense oligonucleotide
  modified_base 1: mod_base = OTHER; note = misc_feature - bicyclic nucleic acid scaffold modification
  modified_base 6: mod_base = OTHER; note = misc_feature - bicyclic nucleic acid scaffold modification
  modified_base 20: mod_base = OTHER; note = misc_feature - bicyclic nucleic acid scaffold modification
  source 1..20: mol_type = other RNA
caactgttgcctccggttct

SEQ ID NO: 5872 - RNA, 20 nt, synthetic construct
  modified_base 20: mod_base = OTHER; note = thymine
  misc_feature 1..20: note = Antisense oligonucleotide
  modified_base 1: mod_base = OTHER; note = misc_feature - bicyclic nucleic acid scaffold modification
  modified_base 9: mod_base = OTHER; note = misc_feature - bicyclic nucleic acid scaffold modification
  modified_base 20: mod_base = OTHER; note = misc_feature - bicyclic nucleic acid scaffold modification
  source 1..20: mol_type = other RNA
caactgttgcctccggttct

SEQ ID NO: 5873 - RNA, 20 nt, synthetic construct
  modified_base 20: mod_base = OTHER; note = thymine
  misc_feature 1..20: note = Antisense oligonucleotide
  modified_base 1: mod_base = OTHER; note = misc_feature - bicyclic nucleic acid scaffold modification
  modified_base 13: mod_base = OTHER; note = misc_feature - bicyclic nucleic acid scaffold modification
  modified_base 20: mod_base = OTHER; note = misc_feature - bicyclic nucleic acid scaffold modification
  source 1..20: mol_type = other RNA
caactgttgcctccggttct

SEQ ID NO: 5874 - RNA, 20 nt, synthetic construct
  modified_base 20: mod_base = OTHER; note = thymine
  misc_feature 1..20: note = Antisense oligonucleotide
  modified_base 1: mod_base = OTHER; note = misc_feature - bicyclic nucleic acid scaffold modification
  modified_base 16: mod_base = OTHER; note = misc_feature - bicyclic nucleic acid scaffold modification
  modified_base 20: mod_base = OTHER; note = misc_feature - bicyclic nucleic acid scaffold modification
  source 1..20: mol_type = other RNA
caactgttgcctccggttct

SEQ ID NO: 5875 - RNA, 20 nt, synthetic construct
  modified_base 20: mod_base = OTHER; note = thymine
  misc_feature 1..20: note = Antisense oligonucleotide
  modified_base 1: mod_base = OTHER; note = misc_feature - bicyclic nucleic acid scaffold modification
  modified_base 19..20: mod_base = OTHER; note = misc_feature - bicyclic nucleic acid scaffold modification
  source 1..20: mol_type = other RNA
caactgttgcctccggttct

SEQ ID NO: 5876 - RNA, 20 nt, synthetic construct
  modified_base 20: mod_base = OTHER; note = thymine
  misc_feature 1..20: note = Antisense oligonucleotide
  modified_base 1: mod_base = OTHER; note = misc_feature - bicyclic nucleic acid scaffold modification
  modified_base 4: mod_base = OTHER; note = misc_feature - bicyclic nucleic acid scaffold modification
  modified_base 9: mod_base = OTHER; note = misc_feature - bicyclic nucleic acid scaffold modification
  modified_base 20: mod_base = OTHER; note = misc_feature - bicyclic nucleic acid scaffold modification
  source 1..20: mol_type = other RNA
caactgttgcctccggttct

SEQ ID NO: 5877 - RNA, 20 nt, synthetic construct
  modified_base 20: mod_base = OTHER; note = thymine
  misc_feature 1..20: note = Antisense oligonucleotide
  modified_base 1: mod_base = OTHER; note = misc_feature - bicyclic nucleic acid scaffold modification
  modified_base 6: mod_base = OTHER; note = misc_feature - bicyclic nucleic acid scaffold modification
  modified_base 19..20: mod_base = OTHER; note = misc_feature - bicyclic nucleic acid scaffold modification
  source 1..20: mol_type = other RNA
caactgttgcctccggttct

SEQ ID NO: 5878 - RNA, 20 nt, synthetic construct
  modified_base 20: mod_base = OTHER; note = thymine
  misc_feature 1..20: note = Antisense oligonucleotide
  modified_base 1..2: mod_base = OTHER; note = misc_feature - bicyclic nucleic acid scaffold modification
  modified_base 19..20: mod_base = OTHER; note = misc_feature - bicyclic nucleic acid scaffold modification
  source 1..20: mol_type = other RNA
caactgttgcctccggttct

SEQ ID NO: 5879 - RNA, 20 nt, synthetic construct
  modified_base 20: mod_base = OTHER; note = thymine
  misc_feature 1..20: note = Antisense oligonucleotide
  modified_base 1: mod_base = OTHER; note = misc_feature - bicyclic nucleic acid scaffold modification
  modified_base 4: mod_base = OTHER; note = misc_feature - bicyclic nucleic acid scaffold modification
  modified_base 19..20: mod_base = OTHER; note = misc_feature - bicyclic nucleic acid scaffold modification
  source 1..20: mol_type = other RNA
caactgttgcctccggttct

SEQ ID NO: 5880 - RNA, 18 nt, synthetic construct
  misc_feature 1..18: note = Antisense oligonucleotide
  modified_base 1: mod_base = OTHER; note = misc_feature - bicyclic nucleic acid scaffold modification
  modified_base 18: mod_base = OTHER; note = misc_feature - bicyclic nucleic acid scaffold modification
  source 1..18: mol_type = other RNA
cattcaactgttgcctcc

SEQ ID NO: 5881 - RNA, 18 nt, synthetic construct
  misc_feature 1..18: note = Antisense oligonucleotide
  modified_base 1: mod_base = OTHER; note = misc_feature - bicyclic nucleic acid scaffold modification
  modified_base 5: mod_base = OTHER; note = misc_feature - bicyclic nucleic acid scaffold modification
  modified_base 18: mod_base = OTHER; note = misc_feature - bicyclic nucleic acid scaffold modification
  source 1..18: mol_type = other RNA
cattcaactgttgcctcc

SEQ ID NO: 5882 - RNA, 18 nt, synthetic construct
  misc_feature 1..18: note = Antisense oligonucleotide
  modified_base 1: mod_base = OTHER; note = misc_feature - bicyclic nucleic acid scaffold modification
  modified_base 8: mod_base = OTHER; note = misc_feature - bicyclic nucleic acid scaffold modification
  modified_base 18: mod_base = OTHER; note = misc_feature - bicyclic nucleic acid scaffold modification
  source 1..18: mol_type = other RNA
cattcaactgttgcctcc

SEQ ID NO: 5883 - RNA, 18 nt, synthetic construct
  misc_feature 1..18: note = Antisense oligonucleotide
  modified_base 1: mod_base = OTHER; note = misc_feature - bicyclic nucleic acid scaffold modification
  modified_base 10: mod_base = OTHER; note = misc_feature - bicyclic nucleic acid scaffold modification
  modified_base 18: mod_base = OTHER; note = misc_feature - bicyclic nucleic acid scaffold modification
  source 1..18: mol_type = other RNA
cattcaactgttgcctcc

SEQ ID NO: 5884 - RNA, 18 nt, synthetic construct
  misc_feature 1..18: note = Antisense oligonucleotide
  modified_base 1: mod_base = OTHER; note = misc_feature - bicyclic nucleic acid scaffold modification
  modified_base 5: mod_base = OTHER; note = misc_feature - bicyclic nucleic acid scaffold modification
  modified_base 10: mod_base = OTHER; note = misc_feature - bicyclic nucleic acid scaffold modification
  modified_base 18: mod_base = OTHER; note = misc_feature - bicyclic nucleic acid scaffold modification
  source 1..18: mol_type = other RNA
cattcaactgttgcctcc

SEQ ID NO: 5885 - RNA, 18 nt, synthetic construct
  misc_feature 1..18: note = Antisense oligonucleotide
  modified_base 1: mod_base = OTHER; note = misc_feature - bicyclic nucleic acid scaffold modification
  modified_base 8: mod_base = OTHER; note = misc_feature - bicyclic nucleic acid scaffold modification
  modified_base 13: mod_base = OTHER; note = misc_feature - bicyclic nucleic acid scaffold modification
  modified_base 18: mod_base = OTHER; note = misc_feature - bicyclic nucleic acid scaffold modification
  source 1..18: mol_type = other RNA
cattcaactgttgcctcc

SEQ ID NO: 5886 - RNA, 18 nt, synthetic construct
  misc_feature 1..18: note = Antisense oligonucleotide
  modified_base 1: mod_base = OTHER; note = misc_feature - bicyclic nucleic acid scaffold modification
  modified_base 17..18: mod_base = OTHER; note = misc_feature - bicyclic nucleic acid scaffold modification
  source 1..18: mol_type = other RNA
cattcaactgttgcctcc

SEQ ID NO: 5887 - RNA, 18 nt, synthetic construct
  misc_feature 1..18: note = Antisense oligonucleotide
  modified_base 1: mod_base = OTHER; note = misc_feature - bicyclic nucleic acid scaffold modification
  modified_base 10: mod_base = OTHER; note = misc_feature - bicyclic nucleic acid scaffold modification
  modified_base 17..18: mod_base = OTHER; note = misc_feature - bicyclic nucleic acid scaffold modification
  source 1..18: mol_type = other RNA
cattcaactgttgcctcc

SEQ ID NO: 5888 - RNA, 18 nt, synthetic construct
  misc_feature 1..18: note = Antisense oligonucleotide
  modified_base 1: mod_base = OTHER; note = misc_feature - bicyclic nucleic acid scaffold modification
  modified_base 8: mod_base = OTHER; note = misc_feature - bicyclic nucleic acid scaffold modification
  modified_base 17..18: mod_base = OTHER; note = misc_feature - bicyclic nucleic acid scaffold modification
  source 1..18: mol_type = other RNA
cattcaactgttgcctcc

SEQ ID NO: 5889 - RNA, 18 nt, synthetic construct
  misc_feature 1..18: note = Antisense oligonucleotide
  modified_base 1: mod_base = OTHER; note = misc_feature - bicyclic nucleic acid scaffold modification
  modified_base 5: mod_base = OTHER; note = misc_feature - bicyclic nucleic acid scaffold modification
  modified_base 17..18: mod_base = OTHER; note = misc_feature - bicyclic nucleic acid scaffold modification
  source 1..18: mol_type = other RNA
cattcaactgttgcctcc

SEQ ID NO: 5890 - RNA, 18 nt, synthetic construct
  misc_feature 1..18: note = Antisense oligonucleotide
  modified_base 1..2: mod_base = OTHER; note = misc_feature - bicyclic nucleic acid scaffold modification
  modified_base 17..18: mod_base = OTHER; note = misc_feature - bicyclic nucleic acid scaffold modification
  source 1..18: mol_type = other RNA
cattcaactgttgcctcc

SEQ ID NO: 5891 - RNA, 18 nt, synthetic construct
  misc_feature 1..18: note = Antisense oligonucleotide
  modified_base 1: mod_base = OTHER; note = misc_feature - bicyclic nucleic acid scaffold modification
  modified_base 18: mod_base = OTHER; note = misc_feature - bicyclic nucleic acid scaffold modification
  source 1..18: mol_type = other RNA
attcaactgttgcctccg

SEQ ID NO: 5892 - RNA, 18 nt, synthetic construct
  misc_feature 1..18: note = Antisense oligonucleotide
  modified_base 1: mod_base = OTHER; note = misc_feature - bicyclic nucleic acid scaffold modification
  modified_base 4: mod_base = OTHER; note = misc_feature - bicyclic nucleic acid scaffold modification
  modified_base 18: mod_base = OTHER; note = misc_feature - bicyclic nucleic acid scaffold modification
  source 1..18: mol_type = other RNA
attcaactgttgcctccg

SEQ ID NO: 5893 - RNA, 18 nt, synthetic construct
  misc_feature 1..18: note = Antisense oligonucleotide
  modified_base 1: mod_base = OTHER; note = misc_feature - bicyclic nucleic acid scaffold modification
  modified_base 7: mod_base = OTHER; note = misc_feature - bicyclic nucleic acid scaffold modification
  modified_base 18: mod_base = OTHER; note = misc_feature - bicyclic nucleic acid scaffold modification
  source 1..18: mol_type = other RNA
attcaactgttgcctccg

SEQ ID NO: 5894 - RNA, 18 nt, synthetic construct
  misc_feature 1..18: note = Antisense oligonucleotide
  modified_base 1: mod_base = OTHER; note = misc_feature - bicyclic nucleic acid scaffold modification
  modified_base 9: mod_base = OTHER; note = misc_feature - bicyclic nucleic acid scaffold modification
  modified_base 18: mod_base = OTHER; note = misc_feature - bicyclic nucleic acid scaffold modification
  source 1..18: mol_type = other RNA
attcaactgttgcctccg

SEQ ID NO: 5895 - RNA, 18 nt, synthetic construct
  misc_feature 1..18: note = Antisense oligonucleotide
  modified_base 1: mod_base = OTHER; note = misc_feature - bicyclic nucleic acid scaffold modification
  modified_base 12: mod_base = OTHER; note = misc_feature - bicyclic nucleic acid scaffold modification
  modified_base 18: mod_base = OTHER; note = misc_feature - bicyclic nucleic acid scaffold modification
  source 1..18: mol_type = other RNA
attcaactgttgcctccg

SEQ ID NO: 5896 - RNA, 18 nt, synthetic construct
  misc_feature 1..18: note = Antisense oligonucleotide
  modified_base 1: mod_base = OTHER; note = misc_feature - bicyclic nucleic acid scaffold modification
  modified_base 17..18: mod_base = OTHER; note = misc_feature - bicyclic nucleic acid scaffold modification
  source 1..18: mol_type = other RNA
attcaactgttgcctccg

SEQ ID NO: 5897 - RNA, 18 nt, synthetic construct
  misc_feature 1..18: note = Antisense oligonucleotide
  modified_base 1: mod_base = OTHER; note = misc_feature - bicyclic nucleic acid scaffold modification
  modified_base 4: mod_base = OTHER; note = misc_feature - bicyclic nucleic acid scaffold modification
  modified_base 9: mod_base = OTHER; note = misc_feature - bicyclic nucleic acid scaffold modification
  modified_base 18: mod_base = OTHER; note = misc_feature - bicyclic nucleic acid scaffold modification
  source 1..18: mol_type = other RNA
attcaactgttgcctccg

SEQ ID NO: 5898 - RNA, 18 nt, synthetic construct
  misc_feature 1..18: note = Antisense oligonucleotide
  modified_base 1: mod_base = OTHER; note = misc_feature - bicyclic nucleic acid scaffold modification
  modified_base 7: mod_base = OTHER; note = misc_feature - bicyclic nucleic acid scaffold modification
  modified_base 12: mod_base = OTHER; note = misc_feature - bicyclic nucleic acid scaffold modification
  modified_base 18: mod_base = OTHER; note = misc_feature - bicyclic nucleic acid scaffold modification
  source 1..18: mol_type = other RNA
attcaactgttgcctccg

SEQ ID NO: 5899 - RNA, 18 nt, synthetic construct
  misc_feature 1..18: note = Antisense oligonucleotide
  modified_base 1: mod_base = OTHER; note = misc_feature - bicyclic nucleic acid scaffold modification
  modified_base 4: mod_base = OTHER; note = misc_feature - bicyclic nucleic acid scaffold modification
  modified_base 7: mod_base = OTHER; note = misc_feature - bicyclic nucleic acid scaffold modification
  modified_base 9: mod_base = OTHER; note = misc_feature - bicyclic nucleic acid scaffold modification
  modified_base 18: mod_base = OTHER; note = misc_feature - bicyclic nucleic acid scaffold modification
  source 1..18: mol_type = other RNA
attcaactgttgcctccg

SEQ ID NO: 5900 - RNA, 18 nt, synthetic construct
  modified_base 2: mod_base = OTHER; note = thymine
  misc_feature 1..18: note = Antisense oligonucleotide
  modified_base 1..2: mod_base = OTHER; note = misc_feature - bicyclic nucleic acid scaffold modification
  modified_base 9: mod_base = OTHER; note = misc_feature - bicyclic nucleic acid scaffold modification
  modified_base 18: mod_base = OTHER; note = misc_feature - bicyclic nucleic acid scaffold modification
  source 1..18: mol_type = other RNA
attcaactgttgcctccg

SEQ ID NO: 5901 - RNA, 18 nt, synthetic construct
  modified_base 2: mod_base = OTHER; note = thymine
  misc_feature 1..18: note = Antisense oligonucleotide
  modified_base 1: mod_base = OTHER; note = misc_feature - bicyclic nucleic acid scaffold modification
  modified_base 7: mod_base = OTHER; note = misc_feature - bicyclic nucleic acid scaffold modification
  modified_base 18: mod_base = OTHER; note = misc_feature - bicyclic nucleic acid scaffold modification
  source 1..18: mol_type = other RNA
attcaactgttgcctccg

SEQ ID NO: 5902 - RNA, 18 nt, synthetic construct
  modified_base 1: mod_base = OTHER; note = thymine
  misc_feature 1..18: note = Antisense oligonucleotide
  modified_base 1: mod_base = OTHER; note = misc_feature - bicyclic nucleic acid scaffold modification
  modified_base 18: mod_base = OTHER; note = misc_feature - bicyclic nucleic acid scaffold modification
  source 1..18: mol_type = other RNA
ttcaactgttgcctccgg

SEQ ID NO: 5903 - RNA, 18 nt, synthetic construct
  modified_base 1: mod_base = OTHER; note = thymine
  misc_feature 1..18: note = Antisense oligonucleotide
  modified_base 1: mod_base = OTHER; note = misc_feature - bicyclic nucleic acid scaffold modification
  modified_base 3: mod_base = OTHER; note = misc_feature - bicyclic nucleic acid scaffold modification
  modified_base 18: mod_base = OTHER; note = misc_feature - bicyclic nucleic acid scaffold modification
  source 1..18: mol_type = other RNA
ttcaactgttgcctccgg

SEQ ID NO: 5904 - RNA, 18 nt, synthetic construct
  modified_base 1: mod_base = OTHER; note = thymine
  misc_feature 1..18: note = Antisense oligonucleotide
  modified_base 1: mod_base = OTHER; note = misc_feature - bicyclic nucleic acid scaffold modification
  modified_base 6: mod_base = OTHER; note = misc_feature - bicyclic nucleic acid scaffold modification
  modified_base 18: mod_base = OTHER; note = misc_feature - bicyclic nucleic acid scaffold modification
  source 1..18: mol_type = other RNA
ttcaactgttgcctccgg

SEQ ID NO: 5905 - RNA, 18 nt, synthetic construct
  modified_base 1: mod_base = OTHER; note = thymine
  misc_feature 1..18: note = Antisense oligonucleotide
  modified_base 1: mod_base = OTHER; note = misc_feature - bicyclic nucleic acid scaffold modification
  modified_base 8: mod_base = OTHER; note = misc_feature - bicyclic nucleic acid scaffold modification
  modified_base 18: mod_base = OTHER; note = misc_feature - bicyclic nucleic acid scaffold modification
  source 1..18: mol_type = other RNA
ttcaactgttgcctccgg

SEQ ID NO: 5906 - RNA, 18 nt, synthetic construct
  modified_base 1: mod_base = OTHER; note = thymine
  misc_feature 1..18: note = Antisense oligonucleotide
  modified_base 1: mod_base = OTHER; note = misc_feature - bicyclic nucleic acid scaffold modification
  modified_base 3: mod_base = OTHER; note = misc_feature - bicyclic nucleic acid scaffold modification
  modified_base 8: mod_base = OTHER; note = misc_feature - bicyclic nucleic acid scaffold modification
  modified_base 18: mod_base = OTHER; note = misc_feature - bicyclic nucleic acid scaffold modification
  source 1..18: mol_type = other RNA
ttcaactgttgcctccgg

SEQ ID NO: 5907 - RNA, 18 nt, synthetic construct
  modified_base 1: mod_base = OTHER; note = thymine
  misc_feature 1..18: note = Antisense oligonucleotide
  modified_base 1: mod_base = OTHER; note = misc_feature - bicyclic nucleic acid scaffold modification
  modified_base 17..18: mod_base = OTHER; note = misc_feature - bicyclic nucleic acid scaffold modification
  source 1..18: mol_type = other RNA
ttcaactgttgcctccgg

SEQ ID NO: 5908 - RNA, 18 nt, synthetic construct
  modified_base 1..2: mod_base = OTHER; note = thymine
  misc_feature 1..18: note = Antisense oligonucleotide
  modified_base 1..2: mod_base = OTHER; note = misc_feature - bicyclic nucleic acid scaffold modification
  modified_base 17..18: mod_base = OTHER; note = misc_feature - bicyclic nucleic acid scaffold modification
  source 1..18: mol_type = other RNA
ttcaactgttgcctccgg

SEQ ID NO: 5909 - RNA, 18 nt, synthetic construct
  modified_base 1: mod_base = OTHER; note = thymine
  misc_feature 1..18: note = Antisense oligonucleotide
  modified_base 1: mod_base = OTHER; note = misc_feature - bicyclic nucleic acid scaffold modification
  modified_base 3: mod_base = OTHER; note = misc_feature - bicyclic nucleic acid scaffold modification
  modified_base 8: mod_base = OTHER; note = misc_feature - bicyclic nucleic acid scaffold modification
  modified_base 18: mod_base = OTHER; note = misc_feature - bicyclic nucleic acid scaffold modification
  source 1..18: mol_type = other RNA
ttcaactgttgcctccgg

SEQ ID NO: 5910 - RNA, 18 nt, synthetic construct
  modified_base 1: mod_base = OTHER; note = thymine
  misc_feature 1..18: note = Antisense oligonucleotide
  modified_base 1: mod_base = OTHER; note = misc_feature - bicyclic nucleic acid scaffold modification
  modified_base 6: mod_base = OTHER; note = misc_feature - bicyclic nucleic acid scaffold modification
  modified_base 8: mod_base = OTHER; note = misc_feature - bicyclic nucleic acid scaffold modification
  modified_base 18: mod_base = OTHER; note = misc_feature - bicyclic nucleic acid scaffold modification
  source 1..18: mol_type = other RNA
ttcaactgttgcctccgg

SEQ ID NO: 5911 - RNA, 18 nt, synthetic construct
  modified_base 1..2: mod_base = OTHER; note = thymine
  misc_feature 1..18: note = Antisense oligonucleotide
  modified_base 1..2: mod_base = OTHER; note = misc_feature - bicyclic nucleic acid scaffold modification
  modified_base 17..18: mod_base = OTHER; note = misc_feature - bicyclic nucleic acid scaffold modification
  source 1..18: mol_type = other RNA
ttcaactgttgcctccgg

SEQ ID NO: 5912 - RNA, 18 nt, synthetic construct
  modified_base 1: mod_base = OTHER; note = thymine
  misc_feature 1..18: note = Antisense oligonucleotide
  modified_base 1: mod_base = OTHER; note = misc_feature - bicyclic nucleic acid scaffold modification
  modified_base 3: mod_base = OTHER; note = misc_feature - bicyclic nucleic acid scaffold modification
  modified_base 6: mod_base = OTHER; note = misc_feature - bicyclic nucleic acid scaffold modification
  modified_base 8: mod_base = OTHER; note = misc_feature - bicyclic nucleic acid scaffold modification
  modified_base 18: mod_base = OTHER; note = misc_feature - bicyclic nucleic acid scaffold modification
  source 1..18: mol_type = other RNA
ttcaactgttgcctccgg

SEQ ID NO: 5913 - RNA, 18 nt, synthetic construct
  modified_base 1: mod_base = OTHER; note = thymine
  modified_base 18: mod_base = OTHER; note = thymine
  misc_feature 1..18: note = Antisense oligonucleotide
  modified_base 1: mod_base = OTHER; note = misc_feature - bicyclic nucleic acid scaffold modification
  modified_base 18: mod_base = OTHER; note = misc_feature - bicyclic nucleic acid scaffold modification
  source 1..18: mol_type = other RNA
tcaactgttgcctccggt

SEQ ID NO: 5914 - RNA, 18 nt, synthetic construct
  modified_base 1: mod_base = OTHER; note = thymine
  modified_base 18: mod_base = OTHER; note = thymine
  misc_feature 1..18: note = Antisense oligonucleotide
  modified_base 1..2: mod_base = OTHER; note = misc_feature - bicyclic nucleic acid scaffold modification
  modified_base 18: mod_base = OTHER; note = misc_feature - bicyclic nucleic acid scaffold modification
  source 1..18: mol_type = other RNA
tcaactgttgcctccggt

SEQ ID NO: 5915 - RNA, 18 nt, synthetic construct
  modified_base 1: mod_base = OTHER; note = thymine
  modified_base 18: mod_base = OTHER; note = thymine
  misc_feature 1..18: note = Antisense oligonucleotide
  modified_base 1: mod_base = OTHER; note = misc_feature - bicyclic nucleic acid scaffold modification
  modified_base 5: mod_base = OTHER; note = misc_feature - bicyclic nucleic acid scaffold modification
  modified_base 18: mod_base = OTHER; note = misc_feature - bicyclic nucleic acid scaffold modification
  source 1..18: mol_type = other RNA
tcaactgttgcctccggt

SEQ ID NO: 5916 - RNA, 18 nt, synthetic construct
  modified_base 1: mod_base = OTHER; note = thymine
  modified_base 18: mod_base = OTHER; note = thymine
  misc_feature 1..18: note = Antisense oligonucleotide
  modified_base 1: mod_base = OTHER; note = misc_feature - bicyclic nucleic acid scaffold modification
  modified_base 7: mod_base = OTHER; note = misc_feature - bicyclic nucleic acid scaffold modification
  modified_base 18: mod_base = OTHER; note = misc_feature - bicyclic nucleic acid scaffold modification
  source 1..18: mol_type = other RNA
tcaactgttgcctccggt

SEQ ID NO: 5917 - RNA, 18 nt, synthetic construct
  modified_base 1: mod_base = OTHER; note = thymine
  modified_base 18: mod_base = OTHER; note = thymine
  misc_feature 1..18: note = Antisense oligonucleotide
  modified_base 1: mod_base = OTHER; note = misc_feature - bicyclic nucleic acid scaffold modification
  modified_base 10: mod_base = OTHER; note = misc_feature - bicyclic nucleic acid scaffold modification
  modified_base 18: mod_base = OTHER; note = misc_feature - bicyclic nucleic acid scaffold modification
  source 1..18: mol_type = other RNA
tcaactgttgcctccggt

SEQ ID NO: 5918 - RNA, 18 nt, synthetic construct
  modified_base 1: mod_base = OTHER; note = thymine
  modified_base 18: mod_base = OTHER; note = thymine
  misc_feature 1..18: note = Antisense oligonucleotide
  modified_base 1..2: mod_base = OTHER; note = misc_feature - bicyclic nucleic acid scaffold modification
  modified_base 7: mod_base = OTHER; note = misc_feature - bicyclic nucleic acid scaffold modification
  modified_base 18: mod_base = OTHER; note = misc_feature - bicyclic nucleic acid scaffold modification
  source 1..18: mol_type = other RNA
tcaactgttgcctccggt

SEQ ID NO: 5919 - RNA, 18 nt, synthetic construct
  modified_base 1: mod_base = OTHER; note = thymine
  modified_base 18: mod_base = OTHER; note = thymine
  misc_feature 1..18: note = Antisense oligonucleotide
  modified_base 1: mod_base = OTHER; note = misc_feature - bicyclic nucleic acid scaffold modification
  modified_base 5: mod_base = OTHER; note = misc_feature - bicyclic nucleic acid scaffold modification
  modified_base 10: mod_base = OTHER; note = misc_feature - bicyclic nucleic acid scaffold modification
  modified_base 18: mod_base = OTHER; note = misc_feature - bicyclic nucleic acid scaffold modification
  source 1..18: mol_type = other RNA
tcaactgttgcctccggt

SEQ ID NO: 5920 - RNA, 18 nt, synthetic construct
  modified_base 1: mod_base = OTHER; note = thymine
  modified_base 18: mod_base = OTHER; note = thymine
  misc_feature 1..18: note = Antisense oligonucleotide
  modified_base 1: mod_base = OTHER; note = misc_feature - bicyclic nucleic acid scaffold modification
  modified_base 17..18: mod_base = OTHER; note = misc_feature - bicyclic nucleic acid scaffold modification
  source 1..18: mol_type = other RNA
tcaactgttgcctccggt

SEQ ID NO: 5921 - RNA, 18 nt, synthetic construct
  modified_base 1: mod_base = OTHER; note = thymine
  modified_base 18: mod_base = OTHER; note = thymine
  misc_feature 1..18: note = Antisense oligonucleotide
  modified_base 1..2: mod_base = OTHER; note = misc_feature - bicyclic nucleic acid scaffold modification
  modified_base 17..18: mod_base = OTHER; note = misc_feature - bicyclic nucleic acid scaffold modification
  source 1..18: mol_type = other RNA
tcaactgttgcctccggt

SEQ ID NO: 5922 - RNA, 18 nt, synthetic construct
  modified_base 1: mod_base = OTHER; note = thymine
  modified_base 18: mod_base = OTHER; note = thymine
  misc_feature 1..18: note = Antisense oligonucleotide
  modified_base 1: mod_base = OTHER; note = misc_feature - bicyclic nucleic acid scaffold modification
  modified_base 7: mod_base = OTHER; note = misc_feature - bicyclic nucleic acid scaffold modification
  modified_base 17..18: mod_base = OTHER; note = misc_feature - bicyclic nucleic acid scaffold modification
  source 1..18: mol_type = other RNA
tcaactgttgcctccggt

SEQ ID NO: 5923 - RNA, 18 nt, synthetic construct
  modified_base 1: mod_base = OTHER; note = thymine
  modified_base 18: mod_base = OTHER; note = thymine
  misc_feature 1..18: note = Antisense oligonucleotide
  modified_base 1..2: mod_base = OTHER; note = misc_feature - bicyclic nucleic acid scaffold modification
  modified_base 5: mod_base = OTHER; note = misc_feature - bicyclic nucleic acid scaffold modification
  modified_base 7: mod_base = OTHER; note = misc_feature - bicyclic nucleic acid scaffold modification
  modified_base 18: mod_base = OTHER; note = misc_feature - bicyclic nucleic acid scaffold modification
  source 1..18: mol_type = other RNA
tcaactgttgcctccggt

SEQ ID NO: 5924 - RNA, 18 nt, synthetic construct
  modified_base 18: mod_base = OTHER; note = thymine
  misc_feature 1..18: note = Antisense oligonucleotide
  modified_base 1: mod_base = OTHER; note = misc_feature - bicyclic nucleic acid scaffold modification
  modified_base 18: mod_base = OTHER; note = misc_feature - bicyclic nucleic acid scaffold modification
  source 1..18: mol_type = other RNA
caactgttgcctccggtt

SEQ ID NO: 5925 - RNA, 18 nt, synthetic construct
  modified_base 18: mod_base = OTHER; note = thymine
  misc_feature 1..18: note = Antisense oligonucleotide
  modified_base 1: mod_base = OTHER; note = misc_feature - bicyclic nucleic acid scaffold modification
  modified_base 4: mod_base = OTHER; note = misc_feature - bicyclic nucleic acid scaffold modification
  modified_base 18: mod_base = OTHER; note = misc_feature - bicyclic nucleic acid scaffold modification
  source 1..18: mol_type = other RNA
caactgttgcctccggtt

SEQ ID NO: 5926 - RNA, 18 nt, synthetic construct
  modified_base 18: mod_base = OTHER; note = thymine
  misc_feature 1..18: note = Antisense oligonucleotide
  modified_base 1: mod_base = OTHER; note = misc_feature - bicyclic nucleic acid scaffold modification
  modified_base 6: mod_base = OTHER; note = misc_feature - bicyclic nucleic acid scaffold modification
  modified_base 18: mod_base = OTHER; note = misc_feature - bicyclic nucleic acid scaffold modification
  source 1..18: mol_type = other RNA
caactgttgcctccggtt

SEQ ID NO: 5927 - RNA, 18 nt, synthetic construct
  modified_base 18: mod_base = OTHER; note = thymine
  misc_feature 1..18: note = Antisense oligonucleotide
  modified_base 1: mod_base = OTHER; note = misc_feature - bicyclic nucleic acid scaffold modification
  modified_base 9: mod_base = OTHER; note = misc_feature - bicyclic nucleic acid scaffold modification
  modified_base 18: mod_base = OTHER; note = misc_feature - bicyclic nucleic acid scaffold modification
  source 1..18: mol_type = other RNA
caactgttgcctccggtt

SEQ ID NO: 5928 - RNA, 18 nt, synthetic construct
  modified_base 18: mod_base = OTHER; note = thymine
  misc_feature 1..18: note = Antisense oligonucleotide
  modified_base 1: mod_base = OTHER; note = misc_feature - bicyclic nucleic acid scaffold modification
  modified_base 13: mod_base = OTHER; note = misc_feature - bicyclic nucleic acid scaffold modification
  modified_base 18: mod_base = OTHER; note = misc_feature - bicyclic nucleic acid scaffold modification
  source 1..18: mol_type = other RNA
caactgttgcctccggtt

SEQ ID NO: 5929 - RNA, 18 nt, synthetic construct
  modified_base 18: mod_base = OTHER; note = thymine
  misc_feature 1..18: note = Antisense oligonucleotide
  modified_base 1: mod_base = OTHER; note = misc_feature - bicyclic nucleic acid scaffold modification
  modified_base 4: mod_base = OTHER; note = misc_feature - bicyclic nucleic acid scaffold modification
  modified_base 6: mod_base = OTHER; note = misc_feature - bicyclic nucleic acid scaffold modification
  modified_base 18: mod_base = OTHER; note = misc_feature - bicyclic nucleic acid scaffold modification
  source 1..18: mol_type = other RNA
caactgttgcctccggtt

SEQ ID NO: 5930 - RNA, 18 nt, synthetic construct
  modified_base 17..18: mod_base = OTHER; note = thymine
  misc_feature 1..18: note = Antisense oligonucleotide
  modified_base 1: mod_base = OTHER; note = misc_feature - bicyclic nucleic acid scaffold modification
  modified_base 17..18: mod_base = OTHER; note = misc_feature - bicyclic nucleic acid scaffold modification
  source 1..18: mol_type = other RNA
caactgttgcctccggtt

SEQ ID NO: 5931 - RNA, 18 nt, synthetic construct
  modified_base 17..18: mod_base = OTHER; note = thymine
  misc_feature 1..18: note = Antisense oligonucleotide
  modified_base 1..2: mod_base = OTHER; note = misc_feature - bicyclic nucleic acid scaffold modification
  modified_base 17..18: mod_base = OTHER; note = misc_feature - bicyclic nucleic acid scaffold modification
  source 1..18: mol_type = other RNA
caactgttgcctccggtt

SEQ ID NO: 5932 - RNA, 18 nt, synthetic construct
  modified_base 17..18: mod_base = OTHER; note = thymine
  misc_feature 1..18: note = Antisense oligonucleotide
  modified_base 1: mod_base = OTHER; note = misc_feature - bicyclic nucleic acid scaffold modification
  modified_base 6: mod_base = OTHER; note = misc_feature - bicyclic nucleic acid scaffold modification
  modified_base 17..18: mod_base = OTHER; note = misc_feature - bicyclic nucleic acid scaffold modification
  source 1..18: mol_type = other RNA
caactgttgcctccggtt

SEQ ID NO: 5933 - RNA, 18 nt, synthetic construct
  modified_base 17..18: mod_base = OTHER; note = thymine
  misc_feature 1..18: note = Antisense oligonucleotide
  modified_base 1: mod_base = OTHER; note = misc_feature - bicyclic nucleic acid scaffold modification
  modified_base 4: mod_base = OTHER; note = misc_feature - bicyclic nucleic acid scaffold modification
  modified_base 6: mod_base = OTHER; note = misc_feature - bicyclic nucleic acid scaffold modification
  modified_base 17..18: mod_base = OTHER; note = misc_feature - bicyclic nucleic acid scaffold modification
  source 1..18: mol_type = other RNA
caactgttgcctccggtt

SEQ ID NO: 5934 - RNA, 18 nt, synthetic construct
  misc_feature 1..18: note = Antisense oligonucleotide
  modified_base 1: mod_base = OTHER; note = misc_feature - bicyclic nucleic acid scaffold modification
  modified_base 18: mod_base = OTHER; note = misc_feature - bicyclic nucleic acid scaffold modification
  source 1..18: mol_type = other RNA
aactgttgcctccggttc

SEQ ID NO: 5935 - RNA, 18 nt, synthetic construct
  misc_feature 1..18: note = Antisense oligonucleotide
  modified_base 1: mod_base = OTHER; note = misc_feature - bicyclic nucleic acid scaffold modification
  modified_base 3: mod_base = OTHER; note = misc_feature - bicyclic nucleic acid scaffold modification
  modified_base 18: mod_base = OTHER; note = misc_feature - bicyclic nucleic acid scaffold modification
  source 1..18: mol_type = other RNA
aactgttgcctccggttc

SEQ ID NO: 5936 - RNA, 18 nt, synthetic construct
  misc_feature 1..18: note = Antisense oligonucleotide
  modified_base 1: mod_base = OTHER; note = misc_feature - bicyclic nucleic acid scaffold modification
  modified_base 5: mod_base = OTHER; note = misc_feature - bicyclic nucleic acid scaffold modification
  modified_base 18: mod_base = OTHER; note = misc_feature - bicyclic nucleic acid scaffold modification
  source 1..18: mol_type = other RNA
aactgttgcctccggttc

SEQ ID NO: 5937 - RNA, 18 nt, synthetic construct
  misc_feature 1..18: note = Antisense oligonucleotide
  modified_base 1: mod_base = OTHER; note = misc_feature - bicyclic nucleic acid scaffold modification
  modified_base 8: mod_base = OTHER; note = misc_feature - bicyclic nucleic acid scaffold modification
  modified_base 18: mod_base = OTHER; note = misc_feature - bicyclic nucleic acid scaffold modification
  source 1..18: mol_type = other RNA
aactgttgcctccggttc

SEQ ID NO: 5938 - RNA, 18 nt, synthetic construct
  misc_feature 1..18: note = Antisense oligonucleotide
  modified_base 1: mod_base = OTHER; note = misc_feature - bicyclic nucleic acid scaffold modification
  modified_base 12: mod_base = OTHER; note = misc_feature - bicyclic nucleic acid scaffold modification
  modified_base 18: mod_base = OTHER; note = misc_feature - bicyclic nucleic acid scaffold modification
  source 1..18: mol_type = other RNA
aactgttgcctccggttc

SEQ ID NO: 5939 - RNA, 18 nt, synthetic construct
  misc_feature 1..18: note = Antisense oligonucleotide
  modified_base 1: mod_base = OTHER; note = misc_feature - bicyclic nucleic acid scaffold modification
  modified_base 3: mod_base = OTHER; note = misc_feature - bicyclic nucleic acid scaffold modification
  modified_base 8: mod_base = OTHER; note = misc_feature - bicyclic nucleic acid scaffold modification
  modified_base 18: mod_base = OTHER; note = misc_feature - bicyclic nucleic acid scaffold modification
  source 1..18: mol_type = other RNA
aactgttgcctccggttc

SEQ ID NO: 5940 - RNA, 18 nt, synthetic construct
  misc_feature 1..18: note = Antisense oligonucleotide
  modified_base 1: mod_base = OTHER; note = misc_feature - bicyclic nucleic acid scaffold modification
  modified_base 3: mod_base = OTHER; note = misc_feature - bicyclic nucleic acid scaffold modification
  modified_base 5: mod_base = OTHER; note = misc_feature - bicyclic nucleic acid scaffold modification
  modified_base 18: mod_base = OTHER; note = misc_feature - bicyclic nucleic acid scaffold modification
  source 1..18: mol_type = other RNA
aactgttgcctccggttc

SEQ ID NO: 5941 - RNA, 18 nt, synthetic construct
  misc_feature 1..18: note = Antisense oligonucleotide
  modified_base 1: mod_base = OTHER; note = misc_feature - bicyclic nucleic acid scaffold modification
  modified_base 3: mod_base = OTHER; note = misc_feature - bicyclic nucleic acid scaffold modification
  modified_base 15: mod_base = OTHER; note = misc_feature - bicyclic nucleic acid scaffold modification
  modified_base 18: mod_base = OTHER; note = misc_feature - bicyclic nucleic acid scaffold modification
  source 1..18: mol_type = other RNA
aactgttgcctccggttc

SEQ ID NO: 5942 - RNA, 18 nt, synthetic construct
  modified_base 17: mod_base = OTHER; note = thymine
  misc_feature 1..18: note = Antisense oligonucleotide
  modified_base 1: mod_base = OTHER; note = misc_feature - bicyclic nucleic acid scaffold modification
  modified_base 17..18: mod_base = OTHER; note = misc_feature - bicyclic nucleic acid scaffold modification
  source 1..18: mol_type = other RNA
aactgttgcctccggttc

SEQ ID NO: 5943 - RNA, 18 nt, synthetic construct
  modified_base 17: mod_base = OTHER; note = thymine
  misc_feature 1..18: note = Antisense oligonucleotide
  modified_base 1..2: mod_base = OTHER; note = misc_feature - bicyclic nucleic acid scaffold modification
  modified_base 17..18: mod_base = OTHER; note = misc_feature - bicyclic nucleic acid scaffold modification
  source 1..18: mol_type = other RNA
aactgttgcctccggttc

SEQ ID NO: 5944 - RNA, 18 nt, synthetic construct
  modified_base 17: mod_base = OTHER; note = thymine
  misc_feature 1..18: note = Antisense oligonucleotide
  modified_base 1..3: mod_base = OTHER; note = misc_feature - bicyclic nucleic acid scaffold modification
  modified_base 17..18: mod_base = OTHER; note = misc_feature - bicyclic nucleic acid scaffold modification
  source 1..18: mol_type = other RNA
aactgttgcctccggttc

SEQ ID NO: 5945 - RNA, 18 nt, synthetic construct
  modified_base 18: mod_base = OTHER; note = thymine
  misc_feature 1..18: note = Antisense oligonucleotide
  modified_base 1: mod_base = OTHER; note = misc_feature - bicyclic nucleic acid scaffold modification
  modified_base 18: mod_base = OTHER; note = misc_feature - bicyclic nucleic acid scaffold modification
  source 1..18: mol_type = other RNA
actgttgcctccggttct

SEQ ID NO: 5946 - RNA, 18 nt, synthetic construct
  modified_base 18: mod_base = OTHER; note = thymine
  misc_feature 1..18: note = Antisense oligonucleotide
  modified_base 1..2: mod_base = OTHER; note = misc_feature - bicyclic nucleic acid scaffold modification
  modified_base 18: mod_base = OTHER; note = misc_feature - bicyclic nucleic acid scaffold modification
  source 1..18: mol_type = other RNA
actgttgcctccggttct

SEQ ID NO: 5947 - RNA, 18 nt, synthetic construct
  modified_base 18: mod_base = OTHER; note = thymine
  misc_feature 1..18: note = Antisense oligonucleotide
  modified_base 1: mod_base = OTHER; note = misc_feature - bicyclic nucleic acid scaffold modification
  modified_base 4: mod_base = OTHER; note = misc_feature - bicyclic nucleic acid scaffold modification
  modified_base 7: mod_base = OTHER; note = misc_feature - bicyclic nucleic acid scaffold modification
  modified_base 18: mod_base = OTHER; note = misc_feature - bicyclic nucleic acid scaffold modification
  source 1..18: mol_type = other RNA
actgttgcctccggttct

SEQ ID NO: 5948 - RNA, 18 nt, synthetic construct
  modified_base 18: mod_base = OTHER; note = thymine
  misc_feature 1..18: note = Antisense oligonucleotide
  modified_base 1: mod_base = OTHER; note = misc_feature - bicyclic nucleic acid scaffold modification
  modified_base 11: mod_base = OTHER; note = misc_feature - bicyclic nucleic acid scaffold modification
  modified_base 18: mod_base = OTHER; note = misc_feature - bicyclic nucleic acid scaffold modification
  source 1..18: mol_type = other RNA
actgttgcctccggttct

SEQ ID NO: 5949 - RNA, 18 nt, synthetic construct
  modified_base 18: mod_base = OTHER; note = thymine
  misc_feature 1..18: note = Antisense oligonucleotide
  modified_base 1: mod_base = OTHER; note = misc_feature - bicyclic nucleic acid scaffold modification
  modified_base 17..18: mod_base = OTHER; note = misc_feature - bicyclic nucleic acid scaffold modification
  source 1..18: mol_type = other RNA
actgttgcctccggttct

SEQ ID NO: 5950 - RNA, 18 nt, synthetic construct
  modified_base 18: mod_base = OTHER; note = thymine
  misc_feature 1..18: note = Antisense oligonucleotide
  modified_base 1: mod_base = OTHER; note = misc_feature - bicyclic nucleic acid scaffold modification
  modified_base 4: mod_base = OTHER; note = misc_feature - bicyclic nucleic acid scaffold modification
  modified_base 17..18: mod_base = OTHER; note = misc_feature - bicyclic nucleic acid scaffold modification
  source 1..18: mol_type = other RNA
actgttgcctccggttct

SEQ ID NO: 5951 - RNA, 18 nt, synthetic construct
  modified_base 18: mod_base = OTHER; note = thymine
  misc_feature 1..18: note = Antisense oligonucleotide
  modified_base 1..2: mod_base = OTHER; note = misc_feature - bicyclic nucleic acid scaffold modification
  modified_base 4: mod_base = OTHER; note = misc_feature - bicyclic nucleic acid scaffold modification
  modified_base 17..18: mod_base = OTHER; note = misc_feature - bicyclic nucleic acid scaffold modification
  source 1..18: mol_type = other RNA
actgttgcctccggttct

SEQ ID NO: 5952 - RNA, 18 nt, synthetic construct
  modified_base 18: mod_base = OTHER; note = thymine
  misc_feature 1..18: note = Antisense oligonucleotide
  modified_base 1..2: mod_base = OTHER; note = misc_feature - bicyclic nucleic acid scaffold modification
  modified_base 4: mod_base = OTHER; note = misc_feature - bicyclic nucleic acid scaffold modification
  modified_base 18: mod_base = OTHER; note = misc_feature - bicyclic nucleic acid scaffold modification
  source 1..18: mol_type = other RNA
actgttgcctccggttct

SEQ ID NO: 5953 - RNA, 18 nt, synthetic construct
  modified_base 18: mod_base = OTHER; note = thymine
  misc_feature 1..18: note = Antisense oligonucleotide
  modified_base 1..2: mod_base = OTHER; note = misc_feature - bicyclic nucleic acid scaffold modification
  modified_base 4: mod_base = OTHER; note = misc_feature - bicyclic nucleic acid scaffold modification
  modified_base 9: mod_base = OTHER; note = misc_feature - bicyclic nucleic acid scaffold modification
  modified_base 17..18: mod_base = OTHER; note = misc_feature - bicyclic nucleic acid scaffold modification
  source 1..18: mol_type = other RNA
actgttgcctccggttct

SEQ ID NO: 5954 - RNA, 16 nt, synthetic construct
  modified_base 16: mod_base = OTHER; note = thymine
  misc_feature 1..16: note = Antisense oligonucleotide
  modified_base 1: mod_base = OTHER; note = misc_feature - bicyclic nucleic acid scaffold modification
  modified_base 16: mod_base = OTHER; note = misc_feature - bicyclic nucleic acid scaffold modification
  source 1..16: mol_type = other RNA
cattcaactgttgcct

SEQ ID NO: 5955 - RNA, 16 nt, synthetic construct
  modified_base 16: mod_base = OTHER; note = thymine
  misc_feature 1..16: note = Antisense oligonucleotide
  modified_base 1: mod_base = OTHER; note = misc_feature - bicyclic nucleic acid scaffold modification
  modified_base 5: mod_base = OTHER; note = misc_feature - bicyclic nucleic acid scaffold modification
  modified_base 16: mod_base = OTHER; note = misc_feature - bicyclic nucleic acid scaffold modification
  source 1..16: mol_type = other RNA
cattcaactgttgcct

SEQ ID NO: 5956 - RNA, 16 nt, synthetic construct
  modified_base 16: mod_base = OTHER; note = thymine
  misc_feature 1..16: note = Antisense oligonucleotide
  modified_base 1: mod_base = OTHER; note = misc_feature - bicyclic nucleic acid scaffold modification
  modified_base 8: mod_base = OTHER; note = misc_feature - bicyclic nucleic acid scaffold modification
  modified_base 16: mod_base = OTHER; note = misc_feature - bicyclic nucleic acid scaffold modification
  source 1..16: mol_type = other RNA
cattcaactgttgcct

SEQ ID NO: 5957 - RNA, 16 nt, synthetic construct
  modified_base 16: mod_base = OTHER; note = thymine
  misc_feature 1..16: note = Antisense oligonucleotide
  modified_base 1: mod_base = OTHER; note = misc_feature - bicyclic nucleic acid scaffold modification
  modified_base 10: mod_base = OTHER; note = misc_feature - bicyclic nucleic acid scaffold modification
  modified_base 16: mod_base = OTHER; note = misc_feature - bicyclic nucleic acid scaffold modification
  source 1..16: mol_type = other RNA
cattcaactgttgcct

SEQ ID NO: 5958 - RNA, 16 nt, synthetic construct
  modified_base 16: mod_base = OTHER; note = thymine
  misc_feature 1..16: note = Antisense oligonucleotide
  modified_base 1: mod_base = OTHER; note = misc_feature - bicyclic nucleic acid scaffold modification
  modified_base 13: mod_base = OTHER; note = misc_feature - bicyclic nucleic acid scaffold modification
  modified_base 16: mod_base = OTHER; note = misc_feature - bicyclic nucleic acid scaffold modification
  source 1..16: mol_type = other RNA
cattcaactgttgcct

SEQ ID NO: 5959 - RNA, 16 nt, synthetic construct
  modified_base 16: mod_base = OTHER; note = thymine
  misc_feature 1..16: note = Antisense oligonucleotide
  modified_base 1: mod_base = OTHER; note = misc_feature - bicyclic nucleic acid scaffold modification
  modified_base 5: mod_base = OTHER; note = misc_feature - bicyclic nucleic acid scaffold modification
  modified_base 10: mod_base = OTHER; note = misc_feature - bicyclic nucleic acid scaffold modification
  modified_base 16: mod_base = OTHER; note = misc_feature - bicyclic nucleic acid scaffold modification
  source 1..16: mol_type = other RNA
cattcaactgttgcct

SEQ ID NO: 5960 - RNA, 16 nt, synthetic construct
  modified_base 16: mod_base = OTHER; note = thymine
  misc_feature 1..16: note = Antisense oligonucleotide
  modified_base 1: mod_base = OTHER; note = misc_feature - bicyclic nucleic acid scaffold modification
  modified_base 5: mod_base = OTHER; note = misc_feature - bicyclic nucleic acid scaffold modification
  modified_base 15..16: mod_base = OTHER; note = misc_feature - bicyclic nucleic acid scaffold modification
  source 1..16: mol_type = other RNA
cattcaactgttgcct

SEQ ID NO: 5961 - RNA, 16 nt, synthetic construct
  modified_base 16: mod_base = OTHER; note = thymine
  misc_feature 1..16: note = Antisense oligonucleotide
  modified_base 1: mod_base = OTHER; note = misc_feature - bicyclic nucleic acid scaffold modification
  modified_base 15..16: mod_base = OTHER; note = misc_feature - bicyclic nucleic acid scaffold modification
  source 1..16: mol_type = other RNA
cattcaactgttgcct

SEQ ID NO: 5962 - RNA, 16 nt, synthetic construct
  modified_base 16: mod_base = OTHER; note = thymine
  misc_feature 1..16: note = Antisense oligonucleotide
  modified_base 1..2: mod_base = OTHER; note = misc_feature - bicyclic nucleic acid scaffold modification
  modified_base 15..16: mod_base = OTHER; note = misc_feature - bicyclic nucleic acid scaffold modification
  source 1..16: mol_type = other RNA
cattcaactgttgcct

SEQ ID NO: 5963 - RNA, 16 nt, synthetic construct
  modified_base 16: mod_base = OTHER; note = thymine
  misc_feature 1..16: note = Antisense oligonucleotide
  modified_base 1: mod_base = OTHER; note = misc_feature - bicyclic nucleic acid scaffold modification
  modified_base 5: mod_base = OTHER; note = misc_feature - bicyclic nucleic acid scaffold modification
  modified_base 8: mod_base = OTHER; note = misc_feature - bicyclic nucleic acid scaffold modification
  modified_base 15..16: mod_base = OTHER; note = misc_feature - bicyclic nucleic acid scaffold modification
  source 1..16: mol_type = other RNA
cattcaactgttgcct

SEQ ID NO: 5964 - RNA, 16 nt, synthetic construct
  modified_base 16: mod_base = OTHER; note = thymine
  misc_feature 1..16: note = Antisense oligonucleotide
  modified_base 1: mod_base = OTHER; note = misc_feature - bicyclic nucleic acid scaffold modification
  modified_base 8: mod_base = OTHER; note = misc_feature - bicyclic nucleic acid scaffold modification
  modified_base 10: mod_base = OTHER; note = misc_feature - bicyclic nucleic acid scaffold modification
  modified_base 15..16: mod_base = OTHER; note = misc_feature - bicyclic nucleic acid scaffold modification
  source 1..16: mol_type = other RNA
cattcaactgttgcct

SEQ ID NO: 5965 - RNA, 16 nt, synthetic construct
  misc_feature 1..16: note = Antisense oligonucleotide
  modified_base 1: mod_base = OTHER; note = misc_feature - bicyclic nucleic acid scaffold modification
  modified_base 16: mod_base = OTHER; note = misc_feature - bicyclic nucleic acid scaffold modification
  source 1..16: mol_type = other RNA
attcaactgttgcctc

SEQ ID NO: 5966 - RNA, 16 nt, synthetic construct
  misc_feature 1..16: note = Antisense oligonucleotide
  modified_base 1: mod_base = OTHER; note = misc_feature - bicyclic nucleic acid scaffold modification
  modified_base 4: mod_base = OTHER; note = misc_feature - bicyclic nucleic acid scaffold modification
  modified_base 16: mod_base = OTHER; note = misc_feature - bicyclic nucleic acid scaffold modification
  source 1..16: mol_type = other RNA
attcaactgttgcctc

SEQ ID NO: 5967 - RNA, 16 nt, synthetic construct
  misc_feature 1..16: note = Antisense oligonucleotide
  modified_base 1: mod_base = OTHER; note = misc_feature - bicyclic nucleic acid scaffold modification
  modified_base 7: mod_base = OTHER; note = misc_feature - bicyclic nucleic acid scaffold modification
  modified_base 16: mod_base = OTHER; note = misc_feature - bicyclic nucleic acid scaffold modification
  source 1..16: mol_type = other RNA
attcaactgttgcctc

SEQ ID NO: 5968 - RNA, 16 nt, synthetic construct
  misc_feature 1..16: note = Antisense oligonucleotide
  modified_base 1: mod_base = OTHER; note = misc_feature - bicyclic nucleic acid scaffold modification
  modified_base 9: mod_base = OTHER; note = misc_feature - bicyclic nucleic acid scaffold modification
  modified_base 16: mod_base = OTHER; note = misc_feature - bicyclic nucleic acid scaffold modification
  source 1..16: mol_type = other RNA
attcaactgttgcctc

SEQ ID NO: 5969 - RNA, 16 nt, synthetic construct
  misc_feature 1..16: note = Antisense oligonucleotide
  modified_base 1: mod_base = OTHER; note = misc_feature - bicyclic nucleic acid scaffold modification
  modified_base 12: mod_base = OTHER; note = misc_feature - bicyclic nucleic acid scaffold modification
  modified_base 16: mod_base = OTHER; note = misc_feature - bicyclic nucleic acid scaffold modification
  source 1..16: mol_type = other RNA
attcaactgttgcctc

SEQ ID NO: 5970 - RNA, 16 nt, synthetic construct
  misc_feature 1..16: note = Antisense oligonucleotide
  modified_base 1: mod_base = OTHER; note = misc_feature - bicyclic nucleic acid scaffold modification
  modified_base 4: mod_base = OTHER; note = misc_feature - bicyclic nucleic acid scaffold modification
  modified_base 9: mod_base = OTHER; note = misc_feature - bicyclic nucleic acid scaffold modification
  modified_base 16: mod_base = OTHER; note = misc_feature - bicyclic nucleic acid scaffold modification
  source 1..16: mol_type = other RNA
attcaactgttgcctc

SEQ ID NO: 5971 - RNA, 16 nt, synthetic construct
  misc_feature 1..16: note = Antisense oligonucleotide
  modified_base 1: mod_base = OTHER; note = misc_feature - bicyclic nucleic acid scaffold modification
  modified_base 4: mod_base = OTHER; note = misc_feature - bicyclic nucleic acid scaffold modification
  modified_base 7: mod_base = OTHER; note = misc_feature - bicyclic nucleic acid scaffold modification
  modified_base 16: mod_base = OTHER; note = misc_feature - bicyclic nucleic acid scaffold modification
  source 1..16: mol_type = other RNA
attcaactgttgcctc

SEQ ID NO: 5972 - RNA, 16 nt, synthetic construct
  misc_feature 1..16: note = Antisense oligonucleotide
  modified_base 1: mod_base = OTHER; note = misc_feature - bicyclic nucleic acid scaffold modification
  modified_base 4: mod_base = OTHER; note = misc_feature - bicyclic nucleic acid scaffold modification
  modified_base 7: mod_base = OTHER; note = misc_feature - bicyclic nucleic acid scaffold modification
  modified_base 9: mod_base = OTHER; note = misc_feature - bicyclic nucleic acid scaffold modification
  modified_base 16: mod_base = OTHER; note = misc_feature - bicyclic nucleic acid scaffold modification
  source 1..16: mol_type = other RNA
attcaactgttgcctc

SEQ ID NO: 5973 - RNA, 16 nt, synthetic construct
  modified_base 2: mod_base = OTHER; note = thymine
  modified_base 15: mod_base = OTHER; note = thymine
  misc_feature 1..16: note = Antisense oligonucleotide
  modified_base 1..2: mod_base = OTHER; note = misc_feature - bicyclic nucleic acid scaffold modification
  modified_base 15..16: mod_base = OTHER; note = misc_feature - bicyclic nucleic acid scaffold modification
  source 1..16: mol_type = other RNA
attcaactgttgcctc

SEQ ID NO: 5974 - RNA, 16 nt, synthetic construct
  modified_base 2: mod_base = OTHER; note = thymine
  modified_base 15: mod_base = OTHER; note = thymine
  misc_feature 1..16: note = Antisense oligonucleotide
  modified_base 1..2: mod_base = OTHER; note = misc_feature - bicyclic nucleic acid scaffold modification
  modified_base 7: mod_base = OTHER; note = misc_feature - bicyclic nucleic acid scaffold modification
  modified_base 15..16: mod_base = OTHER; note = misc_feature - bicyclic nucleic acid scaffold modification
  source 1..16: mol_type = other RNA
attcaactgttgcctc

SEQ ID NO: 5975 - RNA, 16 nt, synthetic construct
  modified_base 2: mod_base = OTHER; note = thymine
  modified_base 15: mod_base = OTHER; note = thymine
  misc_feature 1..16: note = Antisense oligonucleotide
  modified_base 1..2: mod_base = OTHER; note = misc_feature - bicyclic nucleic acid scaffold modification
  modified_base 9: mod_base = OTHER; note = misc_feature - bicyclic nucleic acid scaffold modification
  modified_base 15..16: mod_base = OTHER; note = misc_feature - bicyclic nucleic acid scaffold modification
  source 1..16: mol_type = other RNA
attcaactgttgcctc

SEQ ID NO: 5976 - RNA, 16 nt, synthetic construct
  modified_base 1: mod_base = OTHER; note = thymine
  misc_feature 1..16: note = Antisense oligonucleotide
  modified_base 1: mod_base = OTHER; note = misc_feature - bicyclic nucleic acid scaffold modification
  modified_base 16: mod_base = OTHER; note = misc_feature - bicyclic nucleic acid scaffold modification
  source 1..16: mol_type = other RNA
ttcaactgttgcctcc

SEQ ID NO: 5977 - RNA, 16 nt, synthetic construct
  modified_base 1: mod_base = OTHER; note = thymine
  misc_feature 1..16: note = Antisense oligonucleotide
  modified_base 1: mod_base = OTHER; note = misc_feature - bicyclic nucleic acid scaffold modification
  modified_base 3: mod_base = OTHER; note = misc_feature - bicyclic nucleic acid scaffold modification
  modified_base 16: mod_base = OTHER; note = misc_feature - bicyclic nucleic acid scaffold modification
  source 1..16: mol_type = other RNA
ttcaactgttgcctcc

SEQ ID NO: 5978 - RNA, 16 nt, synthetic construct
  modified_base 1: mod_base = OTHER; note = thymine
  misc_feature 1..16: note = Antisense oligonucleotide
  modified_base 1: mod_base = OTHER; note = misc_feature - bicyclic nucleic acid scaffold modification
  modified_base 6: mod_base = OTHER; note = misc_feature - bicyclic nucleic acid scaffold modification
  modified_base 16: mod_base = OTHER; note = misc_feature - bicyclic nucleic acid scaffold modification
  source 1..16: mol_type = other RNA
ttcaactgttgcctcc

SEQ ID NO: 5979 - RNA, 16 nt, synthetic construct
  modified_base 1: mod_base = OTHER; note = thymine
  misc_feature 1..16: note = Antisense oligonucleotide
  modified_base 1: mod_base = OTHER; note = misc_feature - bicyclic nucleic acid scaffold modification
  modified_base 8: mod_base = OTHER; note = misc_feature - bicyclic nucleic acid scaffold modification
  modified_base 16: mod_base = OTHER; note = misc_feature - bicyclic nucleic acid scaffold modification
  source 1..16: mol_type = other RNA
ttcaactgttgcctcc

SEQ ID NO: 5980 - RNA, 16 nt, synthetic construct
  modified_base 1: mod_base = OTHER; note = thymine
  misc_feature 1..16: note = Antisense oligonucleotide
  modified_base 1: mod_base = OTHER; note = misc_feature - bicyclic nucleic acid scaffold modification
  modified_base 15..16: mod_base = OTHER; note = misc_feature - bicyclic nucleic acid scaffold modification
  source 1..16: mol_type = other RNA
ttcaactgttgcctcc

SEQ ID NO: 5981 - RNA, 16 nt, synthetic construct
  modified_base 1: mod_base = OTHER; note = thymine
  misc_feature 1..16: note = Antisense oligonucleotide
  modified_base 1: mod_base = OTHER; note = misc_feature - bicyclic nucleic acid scaffold modification
  modified_base 3: mod_base = OTHER; note = misc_feature - bicyclic nucleic acid scaffold modification
  modified_base 8: mod_base = OTHER; note = misc_feature - bicyclic nucleic acid scaffold modification
  modified_base 16: mod_base = OTHER; note = misc_feature - bicyclic nucleic acid scaffold modification
  source 1..16: mol_type = other RNA
ttcaactgttgcctcc

SEQ ID NO: 5982 - RNA, 16 nt, synthetic construct
  modified_base 1: mod_base = OTHER; note = thymine
  misc_feature 1..16: note = Antisense oligonucleotide
  modified_base 1: mod_base = OTHER; note = misc_feature - bicyclic nucleic acid scaffold modification
  modified_base 6: mod_base = OTHER; note = misc_feature - bicyclic nucleic acid scaffold modification
  modified_base 8: mod_base = OTHER; note = misc_feature - bicyclic nucleic acid scaffold modification
  modified_base 16: mod_base = OTHER; note = misc_feature - bicyclic nucleic acid scaffold modification
  source 1..16: mol_type = other RNA
ttcaactgttgcctcc

SEQ ID NO: 5983 - RNA, 16 nt, synthetic construct
  modified_base 1: mod_base = OTHER; note = thymine
  misc_feature 1..16: note = Antisense oligonucleotide
  modified_base 1: mod_base = OTHER; note = misc_feature - bicyclic nucleic acid scaffold modification
  modified_base 3: mod_base = OTHER; note = misc_feature - bicyclic nucleic acid scaffold modification
  modified_base 6: mod_base = OTHER; note = misc_feature - bicyclic nucleic acid scaffold modification
  modified_base 8: mod_base = OTHER; note = misc_feature - bicyclic nucleic acid scaffold modification
  modified_base 16: mod_base = OTHER; note = misc_feature - bicyclic nucleic acid scaffold modification
  source 1..16: mol_type = other RNA
ttcaactgttgcctcc

SEQ ID NO: 5984 - RNA, 16 nt, synthetic construct
  modified_base 1: mod_base = OTHER; note = thymine
  misc_feature 1..16: note = Antisense oligonucleotide
  modified_base 1: mod_base = OTHER; note = misc_feature - bicyclic nucleic acid scaffold modification
  modified_base 15..16: mod_base = OTHER; note = misc_feature - bicyclic nucleic acid scaffold modification
  source 1..16: mol_type = other RNA
ttcaactgttgcctcc

SEQ ID NO: 5985 - RNA, 16 nt, synthetic construct
  modified_base 1..2: mod_base = OTHER; note = thymine
  misc_feature 1..16: note = Antisense oligonucleotide
  modified_base 1..2: mod_base = OTHER; note = misc_feature - bicyclic nucleic acid scaffold modification
  modified_base 15..16: mod_base = OTHER; note = misc_feature - bicyclic nucleic acid scaffold modification
  source 1..16: mol_type = other RNA
ttcaactgttgcctcc

SEQ ID NO: 5986 - RNA, 16 nt, synthetic construct
  modified_base 1..2: mod_base = OTHER; note = thymine
  misc_feature 1..16: note = Antisense oligonucleotide
  modified_base 1..2: mod_base = OTHER; note = misc_feature - bicyclic nucleic acid scaffold modification
  modified_base 8: mod_base = OTHER; note = misc_feature - bicyclic nucleic acid scaffold modification
  modified_base 15..16: mod_base = OTHER; note = misc_feature - bicyclic nucleic acid scaffold modification
  source 1..16: mol_type = other RNA
ttcaactgttgcctcc

SEQ ID NO: 5987 - RNA, 16 nt, synthetic construct
  modified_base 1: mod_base = OTHER; note = thymine
  misc_feature 1..16: note = Antisense oligonucleotide
  modified_base 1: mod_base = OTHER; note = misc_feature - bicyclic nucleic acid scaffold modification
  modified_base 16: mod_base = OTHER; note = misc_feature - bicyclic nucleic acid scaffold modification
  source 1..16: mol_type = other RNA
tcaactgttgcctccg

SEQ ID NO: 5988 - RNA, 16 nt, synthetic construct
  modified_base 1: mod_base = OTHER; note = thymine
  misc_feature 1..16: note = Antisense oligonucleotide
  modified_base 1..2: mod_base = OTHER; note = misc_feature - bicyclic nucleic acid scaffold modification
  modified_base 16: mod_base = OTHER; note = misc_feature - bicyclic nucleic acid scaffold modification
  source 1..16: mol_type = other RNA
tcaactgttgcctccg

SEQ ID NO: 5989 - RNA, 16 nt, synthetic construct
  modified_base 1: mod_base = OTHER; note = thymine
  misc_feature 1..16: note = Antisense oligonucleotide
  modified_base 1: mod_base = OTHER; note = misc_feature - bicyclic nucleic acid scaffold modification
  modified_base 5: mod_base = OTHER; note = misc_feature - bicyclic nucleic acid scaffold modification
  modified_base 16: mod_base = OTHER; note = misc_feature - bicyclic nucleic acid scaffold modification
  source 1..16: mol_type = other RNA
tcaactgttgcctccg

SEQ ID NO: 5990 - RNA, 16 nt, synthetic construct
  modified_base 1: mod_base = OTHER; note = thymine
  misc_feature 1..16: note = Antisense oligonucleotide
  modified_base 1: mod_base = OTHER; note = misc_feature - bicyclic nucleic acid scaffold modification
  modified_base 7: mod_base = OTHER; note = misc_feature - bicyclic nucleic acid scaffold modification
  modified_base 16: mod_base = OTHER; note = misc_feature - bicyclic nucleic acid scaffold modification
  source 1..16: mol_type = other RNA
tcaactgttgcctccg

SEQ ID NO: 5991 - RNA, 16 nt, synthetic construct
  modified_base 1: mod_base = OTHER; note = thymine
  misc_feature 1..16: note = Antisense oligonucleotide
  modified_base 1: mod_base = OTHER; note = misc_feature - bicyclic nucleic acid scaffold modification
  modified_base 10: mod_base = OTHER; note = misc_feature - bicyclic nucleic acid scaffold modification
  modified_base 16: mod_base = OTHER; note = misc_feature - bicyclic nucleic acid scaffold modification
  source 1..16: mol_type = other RNA
tcaactgttgcctccg

SEQ ID NO: 5992 - RNA, 16 nt, synthetic construct
  modified_base 1: mod_base = OTHER; note = thymine
  misc_feature 1..16: note = Antisense oligonucleotide
  modified_base 1: mod_base = OTHER; note = misc_feature - bicyclic nucleic acid scaffold modification
  modified_base 15..16: mod_base = OTHER; note = misc_feature - bicyclic nucleic acid scaffold modification
  source 1..16: mol_type = other RNA
tcaactgttgcctccg

SEQ ID NO: 5993 - RNA, 16 nt, synthetic construct
  modified_base 1: mod_base = OTHER; note = thymine
  misc_feature 1..16: note = Antisense oligonucleotide
  modified_base 1: mod_base = OTHER; note = misc_feature - bicyclic nucleic acid scaffold modification
  modified_base 5: mod_base = OTHER; note = misc_feature - bicyclic nucleic acid scaffold modification
  modified_base 7: mod_base = OTHER; note = misc_feature - bicyclic nucleic acid scaffold modification
  modified_base 16: mod_base = OTHER; note = misc_feature - bicyclic nucleic acid scaffold modification
  source 1..16: mol_type = other RNA
tcaactgttgcctccg

SEQ ID NO: 5994 - RNA, 16 nt, synthetic construct
  modified_base 1: mod_base = OTHER; note = thymine
  misc_feature 1..16: note = Antisense oligonucleotide
  modified_base 1..2: mod_base = OTHER; note = misc_feature - bicyclic nucleic acid scaffold modification
  modified_base 7: mod_base = OTHER; note = misc_feature - bicyclic nucleic acid scaffold modification
  modified_base 16: mod_base = OTHER; note = misc_feature - bicyclic nucleic acid scaffold modification
  source 1..16: mol_type = other RNA
tcaactgttgcctccg

SEQ ID NO: 5995 - RNA, 16 nt, synthetic construct
  modified_base 1: mod_base = OTHER; note = thymine
  misc_feature 1..16: note = Antisense oligonucleotide
  modified_base 1..2: mod_base = OTHER; note = misc_feature - bicyclic nucleic acid scaffold modification
  modified_base 15..16: mod_base = OTHER; note = misc_feature - bicyclic nucleic acid scaffold modification
  source 1..16: mol_type = other RNA
tcaactgttgcctccg

SEQ ID NO: 5996 - RNA, 16 nt, synthetic construct
  modified_base 1: mod_base = OTHER; note = thymine
  misc_feature 1..16: note = Antisense oligonucleotide
  modified_base 1..2: mod_base = OTHER; note = misc_feature - bicyclic nucleic acid scaffold modification
  modified_base 7: mod_base = OTHER; note = misc_feature - bicyclic nucleic acid scaffold modification
  modified_base 16: mod_base = OTHER; note = misc_feature - bicyclic nucleic acid scaffold modification
  source 1..16: mol_type = other RNA
tcaactgttgcctccg

SEQ ID NO: 5997 - RNA, 16 nt, synthetic construct
  modified_base 1: mod_base = OTHER; note = thymine
  misc_feature 1..16: note = Antisense oligonucleotide
  modified_base 1..2: mod_base = OTHER; note = misc_feature - bicyclic nucleic acid scaffold modification
  modified_base 5: mod_base = OTHER; note = misc_feature - bicyclic nucleic acid scaffold modification
  modified_base 7: mod_base = OTHER; note = misc_feature - bicyclic nucleic acid scaffold modification
  modified_base 15..16: mod_base = OTHER; note = misc_feature - bicyclic nucleic acid scaffold modification
  source 1..16: mol_type = other RNA
tcaactgttgcctccg

SEQ ID NO: 5998 - RNA, 16 nt, synthetic construct
  misc_feature 1..16: note = Antisense oligonucleotide
  modified_base 1: mod_base = OTHER; note = misc_feature - bicyclic nucleic acid scaffold modification
  modified_base 16: mod_base = OTHER; note = misc_feature - bicyclic nucleic acid scaffold modification
  source 1..16: mol_type = other RNA
caactgttgcctccgg

SEQ ID NO: 5999 - RNA, 16 nt, synthetic construct
  misc_feature 1..16: note = Antisense oligonucleotide
  modified_base 1: mod_base = OTHER; note = misc_feature - bicyclic nucleic acid scaffold modification
  modified_base 4: mod_base = OTHER; note = misc_feature - bicyclic nucleic acid scaffold modification
  modified_base 16: mod_base = OTHER; note = misc_feature - bicyclic nucleic acid scaffold modification
  source 1..16: mol_type = other RNA
caactgttgcctccgg

SEQ ID NO: 6000 - RNA, 16 nt, synthetic construct
  misc_feature 1..16: note = Antisense oligonucleotide
  modified_base 1: mod_base = OTHER; note = misc_feature - bicyclic nucleic acid scaffold modification
  modified_base 6: mod_base = OTHER; note = misc_feature - bicyclic nucleic acid scaffold modification
  modified_base 16: mod_base = OTHER; note = misc_feature - bicyclic nucleic acid scaffold modification
  source 1..16: mol_type = other RNA
caactgttgcctccgg

SEQ ID NO: 6001 - RNA, 16 nt, synthetic construct
  misc_feature 1..16: note = Antisense oligonucleotide
  modified_base 1: mod_base = OTHER; note = misc_feature - bicyclic nucleic acid scaffold modification
  modified_base 9: mod_base = OTHER; note = misc_feature - bicyclic nucleic acid scaffold modification
  modified_base 16: mod_base = OTHER; note = misc_feature - bicyclic nucleic acid scaffold modification
  source 1..16: mol_type = other RNA
caactgttgcctccgg

SEQ ID NO: 6002 - RNA, 16 nt, synthetic construct
  misc_feature 1..16: note = Antisense oligonucleotide
  modified_base 1: mod_base = OTHER; note = misc_feature - bicyclic nucleic acid scaffold modification
  modified_base 13: mod_base = OTHER; note = misc_feature - bicyclic nucleic acid scaffold modification
  modified_base 16: mod_base = OTHER; note = misc_feature - bicyclic nucleic acid scaffold modification
  source 1..16: mol_type = other RNA
caactgttgcctccgg

SEQ ID NO: 6003 - RNA, 16 nt, synthetic construct
  misc_feature 1..16: note = Antisense oligonucleotide
  modified_base 1: mod_base = OTHER; note = misc_feature - bicyclic nucleic acid scaffold modification
  modified_base 15..16: mod_base = OTHER; note = misc_feature - bicyclic nucleic acid scaffold modification
  source 1..16: mol_type = other RNA
caactgttgcctccgg

SEQ ID NO: 6004 - RNA, 16 nt, synthetic construct
  misc_feature 1..16: note = Antisense oligonucleotide
  modified_base 1: mod_base = OTHER; note = misc_feature - bicyclic nucleic acid scaffold modification
  modified_base 4: mod_base = OTHER; note = misc_feature - bicyclic nucleic acid scaffold modification
  modified_base 6: mod_base = OTHER; note = misc_feature - bicyclic nucleic acid scaffold modification
  modified_base 16: mod_base = OTHER; note = misc_feature - bicyclic nucleic acid scaffold modification
  source 1..16: mol_type = other RNA
caactgttgcctccgg

SEQ ID NO: 6005 - RNA, 16 nt, synthetic construct
  misc_feature 1..16: note = Antisense oligonucleotide
  modified_base 1..2: mod_base = OTHER; note = misc_feature - bicyclic nucleic acid scaffold modification
  modified_base 4: mod_base = OTHER; note = misc_feature - bicyclic nucleic acid scaffold modification
  modified_base 6: mod_base = OTHER; note = misc_feature - bicyclic nucleic acid scaffold modification
  modified_base 16: mod_base = OTHER; note = misc_feature - bicyclic nucleic acid scaffold modification
  source 1..16: mol_type = other RNA
caactgttgcctccgg

SEQ ID NO: 6006 - RNA, 16 nt, synthetic construct
  misc_feature 1..16: note = Antisense oligonucleotide
  modified_base 1: mod_base = OTHER; note = misc_feature - bicyclic nucleic acid scaffold modification
  modified_base 9: mod_base = OTHER; note = misc_feature - bicyclic nucleic acid scaffold modification
  modified_base 13: mod_base = OTHER; note = misc_feature - bicyclic nucleic acid scaffold modification
  modified_base 16: mod_base = OTHER; note = misc_feature - bicyclic nucleic acid scaffold modification
  source 1..16: mol_type = other RNA
caactgttgcctccgg

SEQ ID NO: 6007 - RNA, 16 nt, synthetic construct
  modified_base 16: mod_base = OTHER; note = thymine
  misc_feature 1..16: note = Antisense oligonucleotide
  modified_base 1: mod_base = OTHER; note = misc_feature - bicyclic nucleic acid scaffold modification
  modified_base 16: mod_base = OTHER; note = misc_feature - bicyclic nucleic acid scaffold modification
  source 1..16: mol_type = other RNA
aactgttgcctccggt

SEQ ID NO: 6008 - RNA, 16 nt, synthetic construct
  modified_base 16: mod_base = OTHER; note = thymine
  misc_feature 1..16: note = Antisense oligonucleotide
  modified_base 1: mod_base = OTHER; note = misc_feature - bicyclic nucleic acid scaffold modification
  modified_base 3: mod_base = OTHER; note = misc_feature - bicyclic nucleic acid scaffold modification
  modified_base 16: mod_base = OTHER; note = misc_feature - bicyclic nucleic acid scaffold modification
  source 1..16: mol_type = other RNA
aactgttgcctccggt

SEQ ID NO: 6009 - RNA, 16 nt, synthetic construct
  modified_base 16: mod_base = OTHER; note = thymine
  misc_feature 1..16: note = Antisense oligonucleotide
  modified_base 1: mod_base = OTHER; note = misc_feature - bicyclic nucleic acid scaffold modification
  modified_base 5: mod_base = OTHER; note = misc_feature - bicyclic nucleic acid scaffold modification
  modified_base 16: mod_base = OTHER; note = misc_feature - bicyclic nucleic acid scaffold modification
  source 1..16: mol_type = other RNA
aactgttgcctccggt

SEQ ID NO: 6010 - RNA, 16 nt, synthetic construct
  modified_base 16: mod_base = OTHER; note = thymine
  misc_feature 1..16: note = Antisense oligonucleotide
  modified_base 1: mod_base = OTHER; note = misc_feature - bicyclic nucleic acid scaffold modification
  modified_base 8: mod_base = OTHER; note = misc_feature - bicyclic nucleic acid scaffold modification
  modified_base 16: mod_base = OTHER; note = misc_feature - bicyclic nucleic acid scaffold modification
  source 1..16: mol_type = other RNA
aactgttgcctccggt

SEQ ID NO: 6011 - RNA, 16 nt, synthetic construct
  modified_base 16: mod_base = OTHER; note = thymine
  misc_feature 1..16: note = Antisense oligonucleotide
  modified_base 1: mod_base = OTHER; note = misc_feature - bicyclic nucleic acid scaffold modification
  modified_base 15..16: mod_base = OTHER; note = misc_feature - bicyclic nucleic acid scaffold modification
  source 1..16: mol_type = other RNA
aactgttgcctccggt

SEQ ID NO: 6012 - RNA, 16 nt, synthetic construct
  modified_base 16: mod_base = OTHER; note = thymine
  misc_feature 1..16: note = Antisense oligonucleotide
  modified_base 1: mod_base = OTHER; note = misc_feature - bicyclic nucleic acid scaffold modification
  modified_base 3: mod_base = OTHER; note = misc_feature - bicyclic nucleic acid scaffold modification
  modified_base 5: mod_base = OTHER; note = misc_feature - bicyclic nucleic acid scaffold modification
  modified_base 16: mod_base = OTHER; note = misc_feature - bicyclic nucleic acid scaffold modification
  source 1..16: mol_type = other RNA
aactgttgcctccggt

SEQ ID NO: 6013 - RNA, 16 nt, synthetic construct
  modified_base 16: mod_base = OTHER; note = thymine
  misc_feature 1..16: note = Antisense oligonucleotide
  modified_base 1: mod_base = OTHER; note = misc_feature - bicyclic nucleic acid scaffold modification
  modified_base 3: mod_base = OTHER; note = misc_feature - bicyclic nucleic acid scaffold modification
  modified_base 8: mod_base = OTHER; note = misc_feature - bicyclic nucleic acid scaffold modification
  modified_base 16: mod_base = OTHER; note = misc_feature - bicyclic nucleic acid scaffold modification
  source 1..16: mol_type = other RNA
aactgttgcctccggt

SEQ ID NO: 6014 - RNA, 16 nt, synthetic construct
  modified_base 16: mod_base = OTHER; note = thymine
  misc_feature 1..16: note = Antisense oligonucleotide
  modified_base 1..2: mod_base = OTHER; note = misc_feature - bicyclic nucleic acid scaffold modification
  modified_base 5: mod_base = OTHER; note = misc_feature - bicyclic nucleic acid scaffold modification
  modified_base 16: mod_base = OTHER; note = misc_feature - bicyclic nucleic acid scaffold modification
  source 1..16: mol_type = other RNA
aactgttgcctccggt

SEQ ID NO: 6015 - RNA, 16 nt, synthetic construct
  modified_base 16: mod_base = OTHER; note = thymine
  misc_feature 1..16: note = Antisense oligonucleotide
  modified_base 1..3: mod_base = OTHER; note = misc_feature - bicyclic nucleic acid scaffold modification
  modified_base 16: mod_base = OTHER; note = misc_feature - bicyclic nucleic acid scaffold modification
  source 1..16: mol_type = other RNA
aactgttgcctccggt

SEQ ID NO: 6016 - RNA, 16 nt, synthetic construct
  modified_base 16: mod_base = OTHER; note = thymine
  misc_feature 1..16: note = Antisense oligonucleotide
  modified_base 3: mod_base = OTHER; note = misc_feature - bicyclic nucleic acid scaffold modification
  modified_base 5: mod_base = OTHER; note = misc_feature - bicyclic nucleic acid scaffold modification
  modified_base 15..16: mod_base = OTHER; note = misc_feature - bicyclic nucleic acid scaffold modification
  source 1..16: mol_type = other RNA
aactgttgcctccggt

SEQ ID NO: 6017 - RNA, 16 nt, synthetic construct
  modified_base 16: mod_base = OTHER; note = thymine
  misc_feature 1..16: note = Antisense oligonucleotide
  modified_base 1: mod_base = OTHER; note = misc_feature - bicyclic nucleic acid scaffold modification
  modified_base 16: mod_base = OTHER; note = misc_feature - bicyclic nucleic acid scaffold modification
  source 1..16: mol_type = other RNA
actgttgcctccggtt

SEQ ID NO: 6018 - RNA, 16 nt, synthetic construct
  modified_base 16: mod_base = OTHER; note = thymine
  misc_feature 1..16: note = Antisense oligonucleotide
  modified_base 1..2: mod_base = OTHER; note = misc_feature - bicyclic nucleic acid scaffold modification
  modified_base 16: mod_base = OTHER; note = misc_feature - bicyclic nucleic acid scaffold modification
  source 1..16: mol_type = other RNA
actgttgcctccggtt

SEQ ID NO: 6019 - RNA, 16 nt, synthetic construct
  modified_base 16: mod_base = OTHER; note = thymine
  misc_feature 1..16: note = Antisense oligonucleotide
  modified_base 1: mod_base = OTHER; note = misc_feature - bicyclic nucleic acid scaffold modification
  modified_base 4: mod_base = OTHER; note = misc_feature - bicyclic nucleic acid scaffold modification
  modified_base 16: mod_base = OTHER; note = misc_feature - bicyclic nucleic acid scaffold modification
  source 1..16: mol_type = other RNA
actgttgcctccggtt

SEQ ID NO: 6020 - RNA, 16 nt, synthetic construct
  modified_base 16: mod_base = OTHER; note = thymine
  misc_feature 1..16: note = Antisense oligonucleotide
  modified_base 1: mod_base = OTHER; note = misc_feature - bicyclic nucleic acid scaffold modification
  modified_base 7: mod_base = OTHER; note = misc_feature - bicyclic nucleic acid scaffold modification
  modified_base 16: mod_base = OTHER; note = misc_feature - bicyclic nucleic acid scaffold modification
  source 1..16: mol_type = other RNA
actgttgcctccggtt

SEQ ID NO: 6021 - RNA, 16 nt, synthetic construct
  modified_base 16: mod_base = OTHER; note = thymine
  misc_feature 1..16: note = Antisense oligonucleotide
  modified_base 1: mod_base = OTHER; note = misc_feature - bicyclic nucleic acid scaffold modification
  modified_base 11: mod_base = OTHER; note = misc_feature - bicyclic nucleic acid scaffold modification
  modified_base 16: mod_base = OTHER; note = misc_feature - bicyclic nucleic acid scaffold modification
  source 1..16: mol_type = other RNA
actgttgcctccggtt

SEQ ID NO: 6022 - RNA, 16 nt, synthetic construct
  modified_base 15..16: mod_base = OTHER; note = thymine
  misc_feature 1..16: note = Antisense oligonucleotide
  modified_base 1: mod_base = OTHER; note = misc_feature - bicyclic nucleic acid scaffold modification
  modified_base 15..16: mod_base = OTHER; note = misc_feature - bicyclic nucleic acid scaffold modification
  source 1..16: mol_type = other RNA
actgttgcctccggtt

SEQ ID NO: 6023 - RNA, 16 nt, synthetic construct
  modified_base 16: mod_base = OTHER; note = thymine
  misc_feature 1..16: note = Antisense oligonucleotide
  modified_base 1..2: mod_base = OTHER; note = misc_feature - bicyclic nucleic acid scaffold modification
  modified_base 4: mod_base = OTHER; note = misc_feature - bicyclic nucleic acid scaffold modification
  modified_base 16: mod_base = OTHER; note = misc_feature - bicyclic nucleic acid scaffold modification
  source 1..16: mol_type = other RNA
actgttgcctccggtt

SEQ ID NO: 6024 - RNA, 16 nt, synthetic construct
  modified_base 16: mod_base = OTHER; note = thymine
  misc_feature 1..16: note = Antisense oligonucleotide
  modified_base 1..2: mod_base = OTHER; note = misc_feature - bicyclic nucleic acid scaffold modification
  modified_base 7: mod_base = OTHER; note = misc_feature - bicyclic nucleic acid scaffold modification
  modified_base 16: mod_base = OTHER; note = misc_feature - bicyclic nucleic acid scaffold modification
  source 1..16: mol_type = other RNA
actgttgcctccggtt

SEQ ID NO: 6025 - RNA, 16 nt, synthetic construct
  modified_base 16: mod_base = OTHER; note = thymine
  misc_feature 1..16: note = Antisense oligonucleotide
  modified_base 1: mod_base = OTHER; note = misc_feature - bicyclic nucleic acid scaffold modification
  modified_base 7: mod_base = OTHER; note = misc_feature - bicyclic nucleic acid scaffold modification
  modified_base 14: mod_base = OTHER; note = misc_feature - bicyclic nucleic acid scaffold modification
  modified_base 16: mod_base = OTHER; note = misc_feature - bicyclic nucleic acid scaffold modification
  source 1..16: mol_type = other RNA
actgttgcctccggtt

SEQ ID NO: 6026 - RNA, 16 nt, synthetic construct
  modified_base 15..16: mod_base = OTHER; note = thymine
  misc_feature 1..16: note = Antisense oligonucleotide
  modified_base 2: mod_base = OTHER; note = misc_feature - bicyclic nucleic acid scaffold modification
  modified_base 4: mod_base = OTHER; note = misc_feature - bicyclic nucleic acid scaffold modification
  modified_base 15..16: mod_base = OTHER; note = misc_feature - bicyclic nucleic acid scaffold modification
  source 1..16: mol_type = other RNA
actgttgcctccggtt

SEQ ID NO: 6027 - RNA, 16 nt, synthetic construct
  modified_base 15..16: mod_base = OTHER; note = thymine
  misc_feature 1..16: note = Antisense oligonucleotide
  modified_base 1: mod_base = OTHER; note = misc_feature - bicyclic nucleic acid scaffold modification
  modified_base 4: mod_base = OTHER; note = misc_feature - bicyclic nucleic acid scaffold modification
  modified_base 15..16: mod_base = OTHER; note = misc_feature - bicyclic nucleic acid scaffold modification
  source 1..16: mol_type = other RNA
actgttgcctccggtt

SEQ ID NO: 6028 - RNA, 16 nt, synthetic construct
  misc_feature 1..16: note = Antisense oligonucleotide
  modified_base 1: mod_base = OTHER; note = misc_feature - bicyclic nucleic acid scaffold modification
  modified_base 16: mod_base = OTHER; note = misc_feature - bicyclic nucleic acid scaffold modification
  source 1..16: mol_type = other RNA
ctgttgcctccggttc

SEQ ID NO: 6029 - RNA, 16 nt, synthetic construct
  misc_feature 1..16: note = Antisense oligonucleotide
  modified_base 1: mod_base = OTHER; note = misc_feature - bicyclic nucleic acid scaffold modification
  modified_base 3: mod_base = OTHER; note = misc_feature - bicyclic nucleic acid scaffold modification
  modified_base 16: mod_base = OTHER; note = misc_feature - bicyclic nucleic acid scaffold modification
  source 1..16: mol_type = other RNA
ctgttgcctccggttc

SEQ ID NO: 6030 - RNA, 16 nt, synthetic construct
  misc_feature 1..16: note = Antisense oligonucleotide
  modified_base 1: mod_base = OTHER; note = misc_feature - bicyclic nucleic acid scaffold modification
  modified_base 6: mod_base = OTHER; note = misc_feature - bicyclic nucleic acid scaffold modification
  modified_base 16: mod_base = OTHER; note = misc_feature - bicyclic nucleic acid scaffold modification
  source 1..16: mol_type = other RNA
ctgttgcctccggttc

SEQ ID NO: 6031 - RNA, 16 nt, synthetic construct
  misc_feature 1..16: note = Antisense oligonucleotide
  modified_base 1: mod_base = OTHER; note = misc_feature - bicyclic nucleic acid scaffold modification
  modified_base 10: mod_base = OTHER; note = misc_feature - bicyclic nucleic acid scaffold modification
  modified_base 16: mod_base = OTHER; note = misc_feature - bicyclic nucleic acid scaffold modification
  source 1..16: mol_type = other RNA
ctgttgcctccggttc

SEQ ID NO: 6032 - RNA, 16 nt, synthetic construct
  misc_feature 1..16: note = Antisense oligonucleotide
  modified_base 1: mod_base = OTHER; note = misc_feature - bicyclic nucleic acid scaffold modification
  modified_base 13: mod_base = OTHER; note = misc_feature - bicyclic nucleic acid scaffold modification
  modified_base 16: mod_base = OTHER; note = misc_feature - bicyclic nucleic acid scaffold modification
  source 1..16: mol_type = other RNA
ctgttgcctccggttc

SEQ ID NO: 6033 - RNA, 16 nt, synthetic construct
  misc_feature 1..16: note = Antisense oligonucleotide
  modified_base 1: mod_base = OTHER; note = misc_feature - bicyclic nucleic acid scaffold modification
  modified_base 3: mod_base = OTHER; note = misc_feature - bicyclic nucleic acid scaffold modification
  modified_base 6: mod_base = OTHER; note = misc_feature - bicyclic nucleic acid scaffold modification
  modified_base 16: mod_base = OTHER; note = misc_feature - bicyclic nucleic acid scaffold modification
  source 1..16: mol_type = other RNA
ctgttgcctccggttc

SEQ ID NO: 6034 - RNA, 16 nt, synthetic construct
  misc_feature 1..16: note = Antisense oligonucleotide
  modified_base 1: mod_base = OTHER; note = misc_feature - bicyclic nucleic acid scaffold modification
  modified_base 3: mod_base = OTHER; note = misc_feature - bicyclic nucleic acid scaffold modification
  modified_base 13: mod_base = OTHER; note = misc_feature - bicyclic nucleic acid scaffold modification
  modified_base 16: mod_base = OTHER; note = misc_feature - bicyclic nucleic acid scaffold modification
  source 1..16: mol_type = other RNA
ctgttgcctccggttc

SEQ ID NO: 6035 - RNA, 16 nt, synthetic construct
  modified_base 2: mod_base = OTHER; note = thymine
  modified_base 15: mod_base = OTHER; note = thymine
  misc_feature 1..16: note = Antisense oligonucleotide
  modified_base 1..2: mod_base = OTHER; note = misc_feature - bicyclic nucleic acid scaffold modification
  modified_base 15..16: mod_base = OTHER; note = misc_feature - bicyclic nucleic acid scaffold modification
  source 1..16: mol_type = other RNA
ctgttgcctccggttc

SEQ ID NO: 6036 - RNA, 16 nt, synthetic construct
  modified_base 2: mod_base = OTHER; note = thymine
  modified_base 15: mod_base = OTHER; note = thymine
  misc_feature 1..16: note = Antisense oligonucleotide
  modified_base 1..2: mod_base = OTHER; note = misc_feature - bicyclic nucleic acid scaffold modification
  modified_base 15..16: mod_base = OTHER; note = misc_feature - bicyclic nucleic acid scaffold modification
  source 1..16: mol_type = other RNA
ctgttgcctccggttc

SEQ ID NO: 6037 - RNA, 16 nt, synthetic construct
  modified_base 2: mod_base = OTHER; note = thymine
  misc_feature 1..16: note = Antisense oligonucleotide
  modified_base 1..3: mod_base = OTHER; note = misc_feature - bicyclic nucleic acid scaffold modification
  modified_base 16: mod_base = OTHER; note = misc_feature - bicyclic nucleic acid scaffold modification
  source 1..16: mol_type = other RNA
ctgttgcctccggttc

SEQ ID NO: 6038 - RNA, 16 nt, synthetic construct
  modified_base 1: mod_base = OTHER; note = thymine
  modified_base 16: mod_base = OTHER; note = thymine
  misc_feature 1..16: note = Antisense oligonucleotide
  modified_base 1: mod_base = OTHER; note = misc_feature - bicyclic nucleic acid scaffold modification
  modified_base 16: mod_base = OTHER; note = misc_feature - bicyclic nucleic acid scaffold modification
  source 1..16: mol_type = other RNA
tgttgcctccggttct

SEQ ID NO: 6039 - RNA, 16 nt, synthetic construct
  modified_base 1: mod_base = OTHER; note = thymine
  modified_base 16: mod_base = OTHER; note = thymine
  misc_feature 1..16: note = Antisense oligonucleotide
  modified_base 1..2: mod_base = OTHER; note = misc_feature - bicyclic nucleic acid scaffold modification
  modified_base 16: mod_base = OTHER; note = misc_feature - bicyclic nucleic acid scaffold modification
  source 1..16: mol_type = other RNA
tgttgcctccggttct

SEQ ID NO: 6040 - RNA, 16 nt, synthetic construct
  modified_base 1: mod_base = OTHER; note = thymine
  modified_base 16: mod_base = OTHER; note = thymine
  misc_feature 1..16: note = Antisense oligonucleotide
  modified_base 1: mod_base = OTHER; note = misc_feature - bicyclic nucleic acid scaffold modification
  modified_base 5: mod_base = OTHER; note = misc_feature - bicyclic nucleic acid scaffold modification
  modified_base 16: mod_base = OTHER; note = misc_feature - bicyclic nucleic acid scaffold modification
  source 1..16: mol_type = other RNA
tgttgcctccggttct

SEQ ID NO: 6041 - RNA, 16 nt, synthetic construct
  modified_base 1: mod_base = OTHER; note = thymine
  modified_base 16: mod_base = OTHER; note = thymine
  misc_feature 1..16: note = Antisense oligonucleotide
  modified_base 1: mod_base = OTHER; note = misc_feature - bicyclic nucleic acid scaffold modification
  modified_base 9: mod_base = OTHER; note = misc_feature - bicyclic nucleic acid scaffold modification
  modified_base 16: mod_base = OTHER; note = misc_feature - bicyclic nucleic acid scaffold modification
  source 1..16: mol_type = other RNA
tgttgcctccggttct

SEQ ID NO: 6042 - RNA, 16 nt, synthetic construct
  modified_base 1: mod_base = OTHER; note = thymine
  modified_base 16: mod_base = OTHER; note = thymine
  misc_feature 1..16: note = Antisense oligonucleotide
  modified_base 1: mod_base = OTHER; note = misc_feature - bicyclic nucleic acid scaffold modification
  modified_base 12: mod_base = OTHER; note = misc_feature - bicyclic nucleic acid scaffold modification
  modified_base 16: mod_base = OTHER; note = misc_feature - bicyclic nucleic acid scaffold modification
  source 1..16: mol_type = other RNA
tgttgcctccggttct

SEQ ID NO: 6043 - RNA, 16 nt, synthetic construct
  modified_base 1: mod_base = OTHER; note = thymine
  modified_base 16: mod_base = OTHER; note = thymine
  misc_feature 1..16: note = Antisense oligonucleotide
  modified_base 1: mod_base = OTHER; note = misc_feature - bicyclic nucleic acid scaffold modification
  modified_base 15..16: mod_base = OTHER; note = misc_feature - bicyclic nucleic acid scaffold modification
  source 1..16: mol_type = other RNA
tgttgcctccggttct

SEQ ID NO: 6044 - RNA, 16 nt, synthetic construct
  modified_base 1: mod_base = OTHER; note = thymine
  modified_base 16: mod_base = OTHER; note = thymine
  misc_feature 1..16: note = Antisense oligonucleotide
  modified_base 1: mod_base = OTHER; note = misc_feature - bicyclic nucleic acid scaffold modification
  modified_base 7: mod_base = OTHER; note = misc_feature - bicyclic nucleic acid scaffold modification
  modified_base 15..16: mod_base = OTHER; note = misc_feature - bicyclic nucleic acid scaffold modification
  source 1..16: mol_type = other RNA
tgttgcctccggttct

SEQ ID NO: 6045 - RNA, 16 nt, synthetic construct
  modified_base 1: mod_base = OTHER; note = thymine
  modified_base 16: mod_base = OTHER; note = thymine
  misc_feature 1..16: note = Antisense oligonucleotide
  modified_base 1..2: mod_base = OTHER; note = misc_feature - bicyclic nucleic acid scaffold modification
  modified_base 15..16: mod_base = OTHER; note = misc_feature - bicyclic nucleic acid scaffold modification
  source 1..16: mol_type = other RNA
tgttgcctccggttct

SEQ ID NO: 6046 - RNA, 16 nt, synthetic construct
  modified_base 1: mod_base = OTHER; note = thymine
  modified_base 16: mod_base = OTHER; note = thymine
  misc_feature 1..16: note = Antisense oligonucleotide
  modified_base 1..2: mod_base = OTHER; note = misc_feature - bicyclic nucleic acid scaffold modification
  modified_base 5: mod_base = OTHER; note = misc_feature - bicyclic nucleic acid scaffold modification
  modified_base 15..16: mod_base = OTHER; note = misc_feature - bicyclic nucleic acid scaffold modification
  source 1..16: mol_type = other RNA
tgttgcctccggttct

SEQ ID NO: 6047 - RNA, 16 nt, synthetic construct
  modified_base 1: mod_base = OTHER; note = thymine
  modified_base 16: mod_base = OTHER; note = thymine
  misc_feature 1..16: note = Antisense oligonucleotide
  modified_base 1: mod_base = OTHER; note = misc_feature - bicyclic nucleic acid scaffold modification
  modified_base 5: mod_base = OTHER; note = misc_feature - bicyclic nucleic acid scaffold modification
  modified_base 7: mod_base = OTHER; note = misc_feature - bicyclic nucleic acid scaffold modification
  modified_base 15..16: mod_base = OTHER; note = misc_feature - bicyclic nucleic acid scaffold modification
  source 1..16: mol_type = other RNA
tgttgcctccggttct

SEQ ID NO: 6048 - RNA, 16 nt, synthetic construct
  modified_base 1: mod_base = OTHER; note = thymine
  modified_base 16: mod_base = OTHER; note = thymine
  misc_feature 1..16: note = Antisense oligonucleotide
  modified_base 1: mod_base = OTHER; note = misc_feature - bicyclic nucleic acid scaffold modification
  modified_base 5..7: mod_base = OTHER; note = misc_feature - bicyclic nucleic acid scaffold modification
  modified_base 10: mod_base = OTHER; note = misc_feature - bicyclic nucleic acid scaffold modification
  modified_base 15..16: mod_base = OTHER; note = misc_feature - bicyclic nucleic acid scaffold modification
  source 1..16: mol_type = other RNA
tgttgcctccggttct

SEQ ID NO: 6049 - RNA, 25 nt, synthetic construct
  misc_feature 1..25: note = Antisense oligonucleotide
  source 1..25: mol_type = other RNA
  modified_base 1: mod_base = OTHER; note = 2'-O-methyl uridine phosphorothioate
  modified_base 2: mod_base = OTHER; note = 2'-O-methyl uridine phosphorothioate
  modified_base 3: mod_base = OTHER; note = 2'-O-methyl uridine phosphorothioate
  modified_base 4: mod_base = OTHER; note = 2'-O-methyl guanosine phosphorothioate
  modified_base 5: mod_base = OTHER; note = 5-methylcytosine phosphorothioate
  modified_base 6: mod_base = OTHER; note = 5-methylcytosine phosphorothioate
  modified_base 7: mod_base = OTHER; note = 2'-O-methyl guanosine phosphorothioate
  modified_base 8: mod_base = OTHER; note = 5-methylcytosine phosphorothioate
  modified_base 9: mod_base = OTHER; note = 2'-O-methyl uridine phosphorothioate
  modified_base 10: mod_base = OTHER; note = 2'-O-methyl guanosine phosphorothioate
  modified_base 11: mod_base = OTHER; note = 5-methylcytosine phosphorothioate
  modified_base 12: mod_base = OTHER; note = 5-methylcytosine phosphorothioate
  modified_base 13: mod_base = OTHER; note = 5-methylcytosine phosphorothioate
  modified_base 14: mod_base = OTHER; note = 2'-O-methyl adenosine phosphorothioate
  modified_base 15: mod_base = OTHER; note = 2'-O-methyl adenosine phosphorothioate
  modified_base 16: mod_base = OTHER; note = 2'-O-methyl uridine phosphorothioate
  modified_base 17: mod_base = OTHER; note = 2'-O-methyl guanosine phosphorothioate
  modified_base 18: mod_base = OTHER; note = 5-methylcytosine phosphorothioate
  modified_base 19: mod_base = OTHER; note = 5-methylcytosine phosphorothioate
  modified_base 20: mod_base = OTHER; note = 2'-O-methyl adenosine phosphorothioate
  modified_base 21: mod_base = OTHER; note = 2'-O-methyl uridine phosphorothioate
  modified_base 22: mod_base = OTHER; note = 5-methylcytosine phosphorothioate
  modified_base 23: mod_base = OTHER; note = 5-methylcytosine phosphorothioate
  modified_base 24: mod_base = OTHER; note = 2'-O-methyl uridine phosphorothioate
  modified_base 25: mod_base = OTHER; note = 2'-O-methyl guanosine
tttgccgctgcccaatgccatcctg

SEQ ID NO: 6050 - DNA, 20 bp, synthetic construct
  misc_feature 1..20: note = DMD43-45 forward primer
  source 1..20: mol_type = other DNA
cccagcttgatttccaatgg

SEQ ID NO: 6051 - DNA, 15 bp, synthetic construct
  misc_feature 1..15: note = DMD43-45 reverse primer
  source 1..15: mol_type = other DNA
gccgctgcccaatgc

SEQ ID NO: 6052 - DNA, 16 bp, synthetic construct
  misc_feature 1..16: note = DMD43-45 probe
  source 1..16: mol_type = other DNA
accgacaagggaactc

SEQ ID NO: 6053 - DNA, 24 bp, synthetic construct
  misc_feature 1..24: note = DMD44-45 forward primer
  source 1..24: mol_type = other DNA
tgggaacatgctaaatacaaatgg

SEQ ID NO: 6054 - DNA, 15 bp, synthetic construct
  misc_feature 1..15: note = DMD44-45 reverse primer
  source 1..15: mol_type = other DNA
tgccgctgcccaatg

SEQ ID NO: 6055 - DNA, 21 bp, synthetic construct
  misc_feature 1..21: note = DMD44-45 probe
  source 1..21: mol_type = other DNA
atcttaaggaactccaggatg

SEQ ID NO: 6056 - DNA, 26 bp, synthetic construct
  misc_feature 1..26: note = DMD44-46.2 forward primer
  source 1..26: mol_type = other DNA
gagaattgggaacatgctaaatacaa

SEQ ID NO: 6057 - DNA, 25 bp, synthetic construct
  misc_feature 1..25: note = DMD44-46.2 reverse primer
  source 1..25: mol_type = other DNA
cctccaaccataaaacaaattcatt

SEQ ID NO: 6058 - DNA, 22 bp, synthetic construct
  misc_feature 1..22: note = DMD44-46.2 probe
  source 1..22: mol_type = other DNA
tatcttaaggctagaagaacaa

SEQ ID NO: 6059 - DNA, 23 bp, synthetic construct
  misc_feature 1..23: note = DMD52-54 forward primer
  source 1..23: mol_type = other DNA
ccagcaatcaagaggctagaaca

SEQ ID NO: 6060 - DNA, 25 bp, synthetic construct
  misc_feature 1..25: note = DMD52-54 reverse primer
  source 1..25: mol_type = other DNA
tcatttgccacatctacatttgtct

SEQ ID NO: 6061 - DNA, 19 bp, synthetic construct
  misc_feature 1..19: note = DMD52-54 probe
  source 1..19: mol_type = other DNA
attacggatcgaacagttg

SEQ ID NO: 6062 - DNA, 26 bp, synthetic construct
  misc_feature 1..26: note = DMD53-54 forward primer
  source 1..26: mol_type = other DNA
gtccctatacagtagatgcaatccaa

SEQ ID NO: 6063 - DNA, 18 bp, synthetic construct
  misc_feature 1..18: note = DMD53-54 reverse primer
  source 1..18: mol_type = other DNA
gccactggcggaggtctt

SEQ ID NO: 6064 - DNA, 18 bp, synthetic construct
  misc_feature 1..18: note = DMD53-54 probe
  source 1..18: mol_type = other DNA
acagaaaccaagcagttg

SEQ ID NO: 6065 - RNA, 148 nt, synthetic construct
  misc_feature 1..148: note = reverse complementary sequence of human DMD exon 44
  source 1..148: mol_type = other RNA
cttaagataccatttgtatttagcatgttcccaattctcaggaatttgtgtctttctgagaaactgttcagcttctgttagccactgattaaatatctttatatcataatgaaaacgccgccatttctcaacagatctgtcaaatcgc

SEQ ID NO: 6066 - RNA, 176 nt, synthetic construct
  misc_feature 1..176: note = reverse complementary sequence of human DMD exon 45
  source 1..176: mol_type = other RNA
ctcttttttctgtctgacagctgtttgcagacctcctgccaccgcagattcaggcttcccaatttttcctgtagaatactggcatctgtttttgaggattgctgaattatttcttccccagttgcattcaatgttctgacaacagtttgccgctgcccaatgccatcctggagttc

SEQ ID NO: 6067 - RNA, 233 nt, synthetic construct
  misc_feature 1..233: note = reverse complementary sequence of human DMD exon 51
  source 1..233: mol_type = other RNA
cttctgcttgatgatcatctcgttgatatcctcaaggtcacccaccatcaccctctgtgattttataacttgatcaagcagagaaagccagtcggtaagttctgtccaagcccggttgaaatctgccagagcaggtacctccaacatcaaggaagatggcatttctagtttggagatggcagtttccttagtaaccacaggttgtgtcaccagagtaacagtctgagtaggag

SEQ ID NO: 6068 - RNA, 118 nt, synthetic construct
  misc_feature 1..118: note = reverse complementary sequence of human DMD exon 52
  source 1..118: mol_type = other RNA
ttcgatccgtaatgattgttctagcctcttgattgctggtcttgtttttcaaattttgggcagcggtaatgagttcttccaactggggacgcctctgttccaaatcctgcattgttgc

SEQ ID NO: 6069 - RNA, 212 nt, synthetic construct
  misc_feature 1..212: note = reverse complementary sequence of human DMD exon 53
  source 1..212: mol_type = other RNA
cttggtttctgtgattttcttttggattgcatctactgtatagggaccctccttccatgactcaagcttggctctggcctgtcctaagacctgctcagcttcttccttagcttccagccattgtgttgaatcctttaacatttcattcaactgttgcctccggttctgaaggtgttcttgtacttcatcccactgattctgaattctttcaa

SEQ ID NO: 6070 - RNA, 190 nt, synthetic construct
  misc_feature 1..190: note = reverse complementary sequence of human DMD exon 55
  source 1..190: mol_type = other RNA
ttgccattgtttcatcagctcttttactcccttggagtcttctaggagcctttccttacgggtagcatcctgtaggacattggcagttgtttcagcttctgtaagccaggcaagaaacttttccaggtccagggggaactgttgcagtaatctatgagtttcttccaaagcagcctctcgctcactcacc

SEQ ID NO: 6071 - RNA, 25 nt, synthetic construct
  source 1..25: mol_type = other RNA; note = Antisense oligonucleotide
  modified_base 1: mod_base = OTHER; note = misc_feature - 2'-O-methyluridine
  modified_base 2: mod_base = OTHER; note = misc_feature - 2'-O-methyluridine
  modified_base 3: mod_base = OTHER; note = misc_feature - 2'-O-methyluridine
  modified_base 4: mod_base = OTHER; note = misc_feature - 2'-O-methylguanosine
  modified_base 5: mod_base = OTHER; note = misc_feature - 2'-O-methyl-5-methylcytidine
  modified_base 6: mod_base = OTHER; note = misc_feature - 2'-O-methyl-5-methylcytidine
  modified_base 7: mod_base = OTHER; note = misc_feature - 2'-O-methylguanosine
  modified_base 8: mod_base = OTHER; note = misc_feature - 2'-O-methyl-5-methylcytidine
  modified_base 9: mod_base = OTHER; note = misc_feature - 2'-O-methyluridine
  modified_base 10: mod_base = OTHER; note = misc_feature - 2'-O-methylguanosine
  modified_base 11: mod_base = OTHER; note = misc_feature - 2'-O-methyl-5-methylcytidine
  modified_base 12: mod_base = OTHER; note = misc_feature - 2'-O-methyl-5-methylcytidine
  modified_base 13: mod_base = OTHER; note = misc_feature - 2'-O-methyl-5-methylcytidine
  modified_base 14: mod_base = OTHER; note = misc_feature - 2'-O-methyladenosine
  modified_base 15: mod_base = OTHER; note = misc_feature - 2'-O-methyladenosine
  modified_base 16: mod_base = OTHER; note = misc_feature - 2'-O-methyluridine
  modified_base 17: mod_base = OTHER; note = misc_feature - 2'-O-methylguanosine
  modified_base 18: mod_base = OTHER; note = misc_feature - 2'-O-methyl-5-methylcytidine
  modified_base 19: mod_base = OTHER; note = misc_feature - 2'-O-methyl-5-methylcytidine
  modified_base 20: mod_base = OTHER; note = misc_feature - 2'-O-methyladenosine
  modified_base 21: mod_base = OTHER; note = misc_feature - 2'-O-methyluridine
  modified_base 22: mod_base = OTHER; note = misc_feature - 2'-O-methyl-5-methylcytidine
  modified_base 23: mod_base = OTHER; note = misc_feature - 2'-O-methyl-5-methylcytidine
  modified_base 24: mod_base = OTHER; note = misc_feature - 2'-O-methyluridine
  modified_base 25: mod_base = OTHER; note = misc_feature - 2'-O-methylguanosine
tttgccgctgcccaatgccatcctg

SEQ ID NO: 6072 - RNA, 12 nt, synthetic construct
  misc_feature 1..12: note = Core sequence exon 51
  source 1..12: mol_type = other RNA
ggaagatggcat

SEQ ID NO: 6073 - RNA, 18 nt, synthetic construct
  misc_feature 1..18: note = Core sequence exon 51
  source 1..18: mol_type = other RNA
  misc_difference 10: note = misc_feature - n is T or U
ggtaagttcngtccaagc

SEQ ID NO: 6074 - RNA, 14 nt, synthetic construct
  misc_feature 1..14: note = Core sequence exon 45
  source 1..14: mol_type = other RNA
cccaatttttcctg

SEQ ID NO: 6075 - RNA, 15 nt, synthetic construct
  misc_feature 1..15: note = Core sequence exon 45
  source 1..15: mol_type = other RNA
cccaatgccatcctg

SEQ ID NO: 6076 - RNA, 12 nt, synthetic construct
  misc_feature 1..12: note = Core sequence exon 44
  source 1..12: mol_type = other RNA
cttctgttagcc

SEQ ID NO: 6077-6082 - skipped (6 entries)

SEQ ID NO: 6083 - RNA, 10 nt, synthetic construct
  misc_feature 1..10: note = Core sequence exon 45
  source 1..10: mol_type = other RNA
tctgacaaca

SEQ ID NO: 6084 - RNA, 11 nt, synthetic construct
  misc_feature 1..11: note = Core sequence exon 45
  source 1..11: mol_type = other RNA
caatgccatcc

SEQ ID NO: 6085 - RNA, 10 nt, synthetic construct
  misc_feature 1..10: note = Core sequence exon 51
  source 1..10: mol_type = other RNA
aagatggcat

SEQ ID NO: 6086 - RNA, 14 nt, synthetic construct
  misc_feature 1..14: note = Core sequence exon 51
  source 1..14: mol_type = other RNA
taagttctgtccaa

SEQ ID NO: 6087 - RNA, 14 nt, synthetic construct
  misc_feature 1..14: note = Core sequence exon 53
  source 1..14: mol_type = other RNA
gttgcctccggttc

SEQ ID NO: 6088 - skipped

SEQ ID NO: 6089 - RNA, 10 nt, synthetic construct
  misc_feature 1..10: note = Core sequence exon 53
  source 1..10: mol_type = other RNA
gattctgaat
